(19) United States
(12) Patent Application Publication
(10) Pub. No.: US 2020/0199552 A1
(43) Pub. Date: Jun. 25, 2020

(54) VARIANT CAS9 POLYPEPTIDES COMPRISING INTERNAL INSERTIONS

(71) Applicant: The Regents of the University of California, Oakland, CA (US)

(72) Inventors: Benjamin Oakes, Berkeley, CA (US); David Savage, Berkeley, CA (US); Dana Nadler, Berkeley, CA (US); Abraham I. Flamholz, Berkeley, CA (US); Jennifer A. Doudna, Berkeley, CA (US)

(73) Assignee: The Regents of the University of California, Oakland, CA (US)

(21) Appl. No.: 15/751,432

(22) PCT Filed: Sep. 15, 2016
(86) PCT No.: PCT/US2016/051958

§ 371 Date: Feb. 8, 2018

Related U.S. Application Data
(60) Provisional application No. 62/220,161, filed on Sep. 17, 2015.

(51) Int. Cl. C12N 9/22; C07K 14/72; C12N 15/113

(52) U.S. Cl. CPC C12N 9/22; C07K 2319/00; C12N 15/113; C07K 14/721

(57) ABSTRACT

The present disclosure provides variant Cas9 polypeptides, where a variant Cas9 polypeptide of the present disclosure comprises an internal insertion of a heterologous polypeptide. The present disclosure provides nucleic acids comprising nucleotide sequences encoding the variant Cas9 polypeptides. The present disclosure provides host cells comprising a variant Cas9 polypeptide of the present disclosure, or comprising a nucleic acid encoding a variant Cas9 polypeptide of the present disclosure. The present disclosure provides methods of binding and/or modifying a target nucleic acid, involving use of a variant Cas9 polypeptide of the present disclosure.

### CROSS-REFERENCE

[0001] This application claims the benefit of U.S. Provisional Patent Application No. 62/220,161, filed Sep. 17, 2015, which application is incorporated herein by reference in its entirety.

### STATEMENT REGARDING FEDERALLY SPONSORED RESEARCH

[0002] This invention was made with government support under Grant No. EB018658 awarded by The National Institutes of Health. The government has certain rights in the invention.

### INCORPORATION BY REFERENCE OF SEQUENCE LISTING PROVIDED AS A TEXT FILE

[0003] A Sequence Listing is provided herewith as a text file, “BERK-301PRV_Seq_List_ST25.txt” created on Sep. 17, 2015 and having a size of 7,737 KB. The contents of the text file are incorporated by reference herein in their entirety.

### INTRODUCTION

[0004] RNA-mediated adaptive immune systems in bacteria and archaea rely on Clustered Regularly Interspaced Short Palindromic Repeat (CRISPR) genomic loci and CRISPR-associated (Cas) proteins that function together to provide protection from invading viruses and plasmids. In Type II CRISPR-Cas systems, the Cas9 protein functions as an RNA-guided endonuclease that uses a dual-guide RNA consisting of crRNA and trans-activating crRNA (tracrRNA) for target recognition and cleavage by a mechanism involving two nuclease active sites that together generate double-stranded DNA breaks (DSBs).

[0005] RNA-programmed Cas9 has proven to be a versatile tool for genome engineering in multiple cell types and organisms. Guided by a dual-RNA complex or a chimeric single-guide RNA, Cas9 (or variants of Cas9 such as nickase variants) can generate site-specific DSBs or single-stranded breaks (SSBs) within target nucleic acids. Target nucleic acids can include double-stranded DNA (dsDNA) and single-stranded DNA (ssDNA) as well as RNA. When cleavage of a target nucleic acid occurs within a cell (e.g., a eukaryotic cell), the break in the target nucleic acid can be repaired by non-homologous end joining (NHEJ) or homology directed repair (HDR).

[0006] Thus, the Cas9 system provides a facile means of modifying genomic information. In addition, catalytically inactive Cas9 alone or fused to transcriptional activator or repressor domains can be used to alter transcription levels at sites within target nucleic acids by binding to the target site without cleavage.

### SUMMARY

[0007] The present disclosure provides variant Cas9 polypeptides, where a variant Cas9 polypeptide of the present disclosure comprises an internal insertion of a heterologous polypeptide. The present disclosure provides nucleic acids comprising nucleotide sequences encoding the variant Cas9 polypeptides. The present disclosure provides host cells comprising a variant Cas9 polypeptide of the present disclosure, or comprising a nucleic acid encoding a variant Cas9 polypeptide of the present disclosure. The present disclosure provides methods of binding and/or modifying a target nucleic acid, involving use of a variant Cas9 polypeptide of the present disclosure.

### BRIEF DESCRIPTION OF THE DRAWINGS

[0008] FIG. 1A-1E are a collection of diagrams, images and figures showing mapping domain insertion potential into Cas9, according to embodiments of the present disclosure.

[0009] FIG. 2A-2E are a collection of diagrams, images and figures showing creation of a switch-like Cas9, according to embodiments of the present disclosure.

[0010] FIG. 3A-3D are a collection of diagrams, images and figures showing testing of arC9 in eukaryotic cells, according to embodiments of the present disclosure.

[0011] FIG. 4A-4D are a collection of figures showing construction of a transposition library, according to embodiments of the present disclosure.

[0012] FIGS. 5A and 5B are a collection of figures showing results of sequencing a naïve transposon library, according to embodiments of the present disclosure.

[0013] FIGS. 6A and 6B are a collection of images depicting a PDZ domain as a potential scaffolding element for Cas9, according to embodiments of the present disclosure.

[0014] FIG. 7A-7C are a collection of images and figures showing controls for the clustered regularly interspaced short palindromic repeats interference (CRISPRi) screening protocol.

[0015] FIG. 8A-8B are a collection of figures showing domain insertion profiling of a PDZ-insertion library, according to embodiments of the present disclosure.

[0016] FIG. 9A-9B are a collection of images showing PDZ-insertion sites in Cas9, according to embodiments of the present disclosure.

[0017] FIG. 10A-10B are a collection of images showing PDZ-insertion sites in Cas9, according to embodiments of the present disclosure.

[0018] FIG. 11 is an image showing conformations of the estrogen receptor (ER) alpha ligand binding domain (LBD).

[0019] FIG. 12 is an image showing the ER-LBD insertions site in Cas9, according to embodiments of the present disclosure.

[0020] FIGS. 13A and 13B are schematic diagrams showing arC9 human plasmids.

[0021] FIG. 14A-14C are a collection of figures showing arC9 expression levels in human embryonic kidney (HEK) 293T cells, according to embodiments of the present disclosure.

[0022] FIG. 15 is a figure showing validation of PDZ domain insertions in Cas9, according to embodiments of the present disclosure.

[0023] FIG. 16 is a figure showing a schematic model to explain the dual dependence of arC9 activity on expression level and 4-HT.

[0024] FIG. 17 is a figure showing cleavage responses of arC9:231 to 4-HT and temperature, according to embodiments of the present disclosure.

[0025] FIGS. 18A and 18B show amino acid sequences for wild-type and catalytically inactive Streptococcus pyogenes Cas9 protein.

[0026] FIG. 19A-19C show Table 1, showing Cas9 insertion sites for a heterologous polypeptide, according to embodiments of the present disclosure.

[0027] FIG. 20A-20C show Table 2, showing sequences flanking a heterologous polypeptide inserted in a Cas9 fusion polypeptide, according to embodiments of the present disclosure.

[0028] FIGS. 21A and 21B show amino acid sequences of heterologous polypeptides, according to embodiments of the present disclosure.

[0029] FIGS. 22A and 22B show amino acid sequences of Cas9 fusion polypeptides, according to embodiments of the present disclosure. As noted at the bottom of FIG. 20C, in some cases, the last amino acid of the Cas9 sequence flanking the heterologous peptide at the N-terminal end (at the junction of the N-terminal end of the heterologous polypeptide with the Cas9 polypeptide) is mutated. As an illustrative example, in the case depicted in FIG. 22B, there is a Q to H amino acid substitution at position 1027. In this case, the insert site is referred to as 1027 despite the presence of the mutation. Also as noted in FIG. 22B, these cases can be recognized when the amino acid of the Cas9 polypeptide that is N-terminal to the insertion site was mutated from an L, M, Q, K, E, W, or R to an F, I, H, N, D, C, or S, respectively.

[0030] FIG. 23 shows an amino acid sequence of a Cas9 fusion polypeptide, according to embodiments of the present disclosure.

### DEFINITIONS

[0031] By “Cas9 polypeptide” or “Cas9 protein” or “site-directed modifying polypeptide” or “RNA-binding site-directed polypeptide” or “RNA-binding site-directed modifying polypeptide” or “site-directed polypeptide” it is meant a polypeptide that binds RNA and is targeted to a specific DNA sequence. A Cas9 protein as described herein is targeted to a specific DNA sequence by the RNA (a guide RNA) to which it is bound. The guide RNA comprises a sequence that is complementary to a target sequence within the target DNA, thus targeting the bound Cas9 protein to a specific location within the target DNA (the target sequence).

[0032] “Heterologous,” as used herein, means a nucleotide or polypeptide sequence that is not found in the native nucleic acid or protein, respectively. For example, a variant Cas9 polypeptide of the present disclosure comprises: a) a Cas9 polypeptide; and b) a heterologous polypeptide comprising an amino acid sequence from a protein other than Cas9 polypeptide.

[0033] The terms “polynucleotide” and “nucleic acid,” used interchangeably herein, refer to a polymeric form of nucleotides of any length, either ribonucleotides or deoxynucleotides. Thus, this term includes, but is not limited to, single-, double-, or multi-stranded DNA or RNA, genomic DNA, cDNA, DNA-RNA hybrids, or a polymer comprising purine and pyrimidine bases or other natural, chemically or biochemically modified, non-natural, or derivatized nucleotide bases. The terms “polynucleotide” and “nucleic acid” should be understood to include, as applicable to the embodiment being described, single-stranded (such as sense or antisense) and double-stranded polynucleotides.

[0034] The term “naturally-occurring” as used herein as applied to a nucleic acid, a cell, or an organism, refers to a nucleic acid, cell, or organism that is found in nature. For example, a polypeptide or polynucleotide sequence that is present in an organism (including viruses) that can be isolated from a source in nature and which has not been intentionally modified by a human in the laboratory is naturally occurring.

[0035] As used herein the term “isolated” is meant to describe a polynucleotide, a polypeptide, or a cell that is in an environment different from that in which the polynucleotide, the polypeptide, or the cell naturally occurs. An isolated genetically modified host cell may be present in a mixed population of genetically modified host cells.

[0036] As used herein, the term “exogenous nucleic acid” refers to a nucleic acid that is not normally or naturally found in and/or produced by a given bacterium, organism, or cell in nature. As used herein, the term “endogenous nucleic acid” refers to a nucleic acid that is normally found in and/or produced by a given bacterium, organism, or cell in nature. An “endogenous nucleic acid” is also referred to as a “native nucleic acid” or a nucleic acid that is “native” to a given bacterium, organism, or cell.

[0037] “Recombinant,” as used herein, means that a particular nucleic acid (DNA or RNA) is the product of various combinations of cloning, restriction, and/or ligation steps resulting in a construct having a structural coding or non-coding sequence distinguishable from endogenous nucleic acids found in natural systems. Generally, DNA sequences encoding the structural coding sequence can be assembled from cDNA fragments and short oligonucleotide linkers, or from a series of synthetic oligonucleotides, to provide a synthetic nucleic acid which is capable of being expressed from a recombinant transcriptional unit contained in a cell or in a cell-free transcription and translation system. Such sequences can be provided in the form of an open reading frame uninterrupted by internal non-translated sequences, or introns, which are typically present in eukaryotic genes. Genomic DNA comprising the relevant sequences can also be used in the formation of a recombinant gene or transcriptional unit. Sequences of non-translated DNA may be present 5′ or 3′ from the open reading frame, where such sequences do not interfere with manipulation or expression of the coding regions, and may indeed act to modulate production of a desired product by various mechanisms (see “DNA regulatory sequences”, below).

[0038] Thus, e.g., the term “recombinant” polynucleotide or “recombinant” nucleic acid refers to one which is not naturally occurring, e.g., is made by the artificial combination of two otherwise separated segments of sequence through human intervention. This artificial combination is often accomplished by either chemical synthesis means, or by the artificial manipulation of isolated segments of nucleic acids, e.g., by genetic engineering techniques. Such is usually done to replace a codon with a redundant codon encoding the same or a conservative amino acid, while typically introducing or removing a sequence recognition site. Alternatively, it is performed to join together nucleic acid segments of desired functions to generate a desired combination of functions. This artificial combination is often accomplished by either chemical synthesis means, or by the artificial manipulation of isolated segments of nucleic acids, e.g., by genetic engineering techniques.

[0039] Similarly, the term “recombinant” polypeptide refers to a polypeptide which is not naturally occurring, e.g., is made by the artificial combination of two otherwise separated segments of amino sequence through human intervention. Thus, e.g., a polypeptide that comprises a heterologous amino acid sequence is recombinant.

[0040] By “construct” or “vector” is meant a recombinant nucleic acid, generally recombinant DNA, which has been generated for the purpose of the expression and/or propagation of a specific nucleotide sequence(s), or is to be used in the construction of other recombinant nucleotide sequences.

[0041] The terms “DNA regulatory sequences,” “control elements,” and “regulatory elements,” used interchangeably herein, refer to transcriptional and translational control sequences, such as promoters, enhancers, polyadenylation signals, terminators, protein degradation signals, and the like, that provide for and/or regulate expression of a coding sequence and/or production of an encoded polypeptide in a host cell.

[0042] The term “transformation” is used interchangeably herein with “genetic modification” and refers to a permanent or transient genetic change induced in a cell following introduction of new nucleic acid (i.e., DNA exogenous to the cell). Genetic change (“modification”) can be accomplished either by incorporation of the new DNA into the genome of the host cell, or by transient or stable maintenance of the new DNA as an episomal element. Where the cell is a eukaryotic cell, a permanent genetic change is generally achieved by introduction of the DNA into the genome of the cell. In prokaryotic cells, permanent changes can be introduced into the chromosome or via extrachromosomal elements such as plasmids and expression vectors, which may contain one or more selectable markers to aid in their maintenance in the recombinant host cell. Suitable methods of genetic modification include viral infection, transfection, conjugation, protoplast fusion, electroporation, particle gun technology, calcium phosphate precipitation, direct microinjection, and the like. The choice of method is generally dependent on the type of cell being transformed and the circumstances under which the transformation is taking place (i.e. in vitro, ex vivo, or in vivo). A general discussion of these methods can be found in Ausubel, et al, Short Protocols in Molecular Biology, 3rd ed., Wiley & Sons, 1995.

[0043] “Operably linked” refers to a juxtaposition wherein the components so described are in a relationship permitting them to function in their intended manner. For instance, a promoter is operably linked to a coding sequence if the promoter affects its transcription or expression. As used herein, the terms “heterologous promoter” and “heterologous control regions” refer to promoters and other control regions that are not normally associated with a particular nucleic acid in nature. For example, a “transcriptional control region heterologous to a coding region” is a transcriptional control region that is not normally associated with the coding region in nature.

[0044] A “host cell,” as used herein, denotes an in vivo or in vitro eukaryotic cell, a prokaryotic cell, or a cell from a multicellular organism (e.g., a cell line) cultured as a unicellular entity, which eukaryotic or prokaryotic cells can be, or have been, used as recipients for a nucleic acid (e.g., an expression vector that comprises a nucleotide sequence encoding one or more biosynthetic pathway gene products such as mevalonate pathway gene products), and include the progeny of the original cell which has been genetically modified by the nucleic acid. It is understood that the progeny of a single cell may not necessarily be completely identical in morphology or in genomic or total DNA complement as the original parent, due to natural, accidental, or deliberate mutation. A “recombinant host cell” (also referred to as a “genetically modified host cell”) is a host cell into which has been introduced a heterologous nucleic acid, e.g., an expression vector. For example, a subject prokaryotic host cell is a genetically modified prokaryotic host cell (e.g., a bacterium), by virtue of introduction into a suitable prokaryotic host cell of a heterologous nucleic acid, e.g., an exogenous nucleic acid that is foreign to (not normally found in nature in) the prokaryotic host cell, or a recombinant nucleic acid that is not normally found in the prokaryotic host cell; and a subject eukaryotic host cell is a genetically modified eukaryotic host cell, by virtue of introduction into a suitable eukaryotic host cell of a heterologous nucleic acid, e.g., an exogenous nucleic acid that is foreign to the eukaryotic host cell, or a recombinant nucleic acid that is not normally found in the eukaryotic host cell.

[0045] The term “conservative amino acid substitution” refers to the interchangeability in proteins of amino acid residues having similar side chains. For example, a group of amino acids having aliphatic side chains consists of glycine, alanine, valine, leucine, and isoleucine; a group of amino acids having aliphatic-hydroxyl side chains consists of serine and threonine; a group of amino acids having amide-containing side chains consists of asparagine and glutamine; a group of amino acids having aromatic side chains consists of phenylalanine, tyrosine, and tryptophan; a group of amino acids having basic side chains consists of lysine, arginine, and histidine; and a group of amino acids having sulfur-containing side chains consists of cysteine and methionine. Exemplary conservative amino acid substitution groups are: valine-leucine-isoleucine, phenylalanine-tyrosine, lysine-arginine, alanine-valine, and asparagine-glutamine.

[0046] A polynucleotide or polypeptide has a certain percent “sequence identity” to another polynucleotide or polypeptide, meaning that, when aligned, that percentage of bases or amino acids are the same, and in the same relative position, when comparing the two sequences. Sequence similarity can be determined in a number of different manners. To determine sequence identity, sequences can be aligned using the methods and computer programs, including BLAST, available over the world wide web at ncbi.nlm.nih.gov/BLAST. See, e.g., Altschul et al. (1990), J. Mol. Biol. 215:403-10. Another alignment algorithm is FASTA, available in the Genetics Computing Group (GCG) package, from Madison, Wis., USA, a wholly owned subsidiary of Oxford Molecular Group, Inc. Other techniques for alignment are described in Methods in Enzymology, vol. 266: Computer Methods for Macromolecular Sequence Analysis (1996), ed. Doolittle, Academic Press, Inc., a division of Harcourt Brace & Co., San Diego, Calif., USA. Of particular interest are alignment programs that permit gaps in the sequence. The Smith-Waterman is one type of algorithm that permits gaps in sequence alignments. See Meth. Mol. Biol. 70: 173-187 (1997). Also, the GAP program using the Needleman and Wunsch alignment method can be utilized to align sequences. See J. Mol. Biol. 48: 443-453 (1970).

[0047] Before the present invention is further described, it is to be understood that this invention is not limited to particular embodiments described, as such may, of course, vary. It is also to be understood that the terminology used herein is for the purpose of describing particular embodiments only, and is not intended to be limiting, since the scope of the present invention will be limited only by the appended claims.

[0048] Where a range of values is provided, it is understood that each intervening value, to the tenth of the unit of the lower limit unless the context clearly dictates otherwise, between the upper and lower limit of that range and any other stated or intervening value in that stated range, is encompassed within the invention. The upper and lower limits of these smaller ranges may independently be included in the smaller ranges, and are also encompassed within the invention, subject to any specifically excluded limit in the stated range. Where the stated range includes one or both of the limits, ranges excluding either or both of those included limits are also included in the invention.

[0049] Unless defined otherwise, all technical and scientific terms used herein have the same meaning as commonly understood by one of ordinary skill in the art to which this invention belongs. Although any methods and materials similar or equivalent to those described herein can also be used in the practice or testing of the present invention, the preferred methods and materials are now described. All publications mentioned herein are incorporated herein by reference to disclose and describe the methods and/or materials in connection with which the publications are cited.

[0050] It must be noted that as used herein and in the appended claims, the singular forms “a,” “an,” and “the” include plural referents unless the context clearly dictates otherwise. Thus, for example, reference to “a variant Cas9 polypeptide” includes a plurality of such polypeptides and reference to “the heterologous polypeptide” includes reference to one or more heterologous polypeptides and equivalents thereof known to those skilled in the art, and so forth. It is further noted that the claims may be drafted to exclude any optional element. As such, this statement is intended to serve as antecedent basis for use of such exclusive terminology as “solely,” “only” and the like in connection with the recitation of claim elements, or use of a “negative” limitation.

[0051] It is appreciated that certain features of the invention, which are, for clarity, described in the context of separate embodiments, may also be provided in combination in a single embodiment. Conversely, various features of the invention, which are, for brevity, described in the context of a single embodiment, may also be provided separately or in any suitable sub-combination. All combinations of the embodiments pertaining to the invention are specifically embraced by the present invention and are disclosed herein just as if each and every combination was individually and explicitly disclosed. In addition, all sub-combinations of the various embodiments and elements thereof are also specifically embraced by the present invention and are disclosed herein just as if each and every such sub-combination was individually and explicitly disclosed herein.

[0052] The publications discussed herein are provided solely for their disclosure prior to the filing date of the present application. Nothing herein is to be construed as an admission that the present invention is not entitled to antedate such publication by virtue of prior invention. Further, the dates of publication provided may be different from the actual publication dates which may need to be independently confirmed.

### DETAILED DESCRIPTION

[0053] The present disclosure provides variant Cas9 polypeptides (“Cas9 fusion polypeptides”), where a variant Cas9 polypeptide of the present disclosure comprises an internal insertion of a heterologous polypeptide. The present disclosure provides nucleic acids comprising nucleotide sequences encoding the variant Cas9 polypeptides. The present disclosure provides host cells comprising a variant Cas9 polypeptide of the present disclosure, or comprising a nucleic acid encoding a variant Cas9 polypeptide of the present disclosure. The present disclosure provides methods of binding and/or modifying a target nucleic acid, involving use of a variant Cas9 polypeptide of the present disclosure.

### Variant Cas9 Polypeptides

[0054] The present disclosure provides variant Cas9 polypeptides comprising one or more heterologous polypeptides inserted internally within the Cas9 polypeptide at one or more internal insertion sites. A variant Cas9 polypeptide of the present disclosure is also referred to as a “Cas9 fusion polypeptide.”

[0055] A Cas9 fusion polypeptide of the present disclosure comprises: a) a Cas9 polypeptide; and (b) a heterologous amino acid or heterologous polypeptide inserted internally within the Cas9 polypeptide. In some cases, the heterologous amino acid or heterologous polypeptide is inserted at a position that is immediately adjacent and C-terminal to an amino acid residue corresponding to a residue selected from 3, 4, 42, 112, 127, 193, 197, 202, 204, 205, 206, 207, 208, 209, 211, 214, 217, 228, 231, 238, 257, 259, 313, 390, 456, 460, 467, 468, 470, 474, 532, 533, 536, 576, 577, 579, 588, 639, 641, 645, 647, 687, 689, 690, 692, 713, 715, 717, 719, 721, 724, 798, 801, 802, 804, 834, 868, 890, 940, 941, 944, 947, 952, 1010, 1011, 1012, 1015, 1016, 1022, 1026, 1027, 1031, 1034, 1046, 1047, 1049, 1050, 1051, 1052, 1053, 1054, 1056, 1058, 1061, 1062, 1063, 1064, 1065, 1068, 1070, 1071, 1073, 1145, 1148, 1149, 1152, 1153, 1155, 1156, 1160, 1161, 1175, 1179, 1183, 1186, 1188, 1189, 1190, 1191, 1193, 1194, 1195, 1196, 1197, 1204, 1205, 1206, 1207, 1212, 1213, 1228, 1229, 1230, 1233, 1234, 1237, 1238, 1239, 1240, 1242, 1243, 1244, 1246, 1247, 1248, 1250, 1251, 1252, 1253, 1255, 1259, 1260, 1262, 1267, 1268, 1269, 1270, 1281, 1282, 1283, 1284, 1287, 1289, 1291, 1292, 1293, 1294, 1295, 1296, 1298, 1299, 1300, 1302, 1304, 1306, 1307, 1344, 1346, 1347, 1348, 1360, 1363, 1366, and 1367, based on the numbering of the Cas9 protein set forth in SEQ ID NO: 5. The Cas9 fusion polypeptide retains binding target nucleic acid binding activity relative to the binding activity of the Cas9 polypeptide without the inserted heterologous amino acid or heterologous polypeptide.

[0056] In some cases, the heterologous amino acid or heterologous polypeptide is inserted at a position that is immediately adjacent and N-terminal to an amino acid residue corresponding to a residue selected from 3, 4, 42, 112, 127, 193, 197, 202, 204, 205, 206, 207, 208, 209, 211, 214, 217, 228, 231, 238, 257, 259, 313, 390, 456, 460, 467, 468, 470, 474, 532, 533, 536, 576, 577, 579, 588, 639, 641, 645, 647, 687, 689, 690, 692, 713, 715, 717, 719, 721, 724, 798, 801, 802, 804, 834, 868, 890, 940, 941, 944, 947, 952, 1010, 1011, 1012, 1015, 1016, 1022, 1026, 1027, 1031, 1034, 1046, 1047, 1049, 1050, 1051, 1052, 1053, 1054, 1056, 1058, 1061, 1062, 1063, 1064, 1065, 1068, 1070, 1071, 1073, 1145, 1148, 1149, 1152, 1153, 1155, 1156, 1160, 1161, 1175, 1179, 1183, 1186, 1188, 1189, 1190, 1191, 1193, 1194, 1195, 1196, 1197, 1204, 1205, 1206, 1207, 1212, 1213, 1228, 1229, 1230, 1233, 1234, 1237, 1238, 1239, 1240, 1242, 1243, 1244, 1246, 1247, 1248, 1250, 1251, 1252, 1253, 1255, 1259, 1260, 1262, 1267, 1268, 1269, 1270, 1281, 1282, 1283, 1284, 1287, 1289, 1291, 1292, 1293, 1294, 1295, 1296, 1298, 1299, 1300, 1302, 1304, 1306, 1307, 1344, 1346, 1347, 1348, 1360, 1363, 1366, and 1367, based on the numbering of the Cas9 protein set forth in SEQ ID NO: 5. The Cas9 fusion polypeptide retains binding target nucleic acid binding activity relative to the binding activity of the Cas9 polypeptide without the inserted heterologous amino acid or heterologous polypeptide.

[0057] In some cases, a Cas9 fusion polypeptide of the present disclosure comprises: (a) a Cas9 polypeptide; and (b) a heterologous amino acid or heterologous polypeptide inserted internally within the Cas9 polypeptide, wherein the heterologous amino acid or heterologous polypeptide is inserted at a position that is immediately adjacent and C-terminal to an amino acid residue corresponding to a residue selected from 3, 4, 42, 112, 127, 193, 197, 202, 204, 205, 206, 207, 208, 209, 211, 214, 217, 228, 231, 238, 257, 259, 313, 390, 456, 460, 467, 468, 470, 474, 532, 533, 536, 576, 577, 579, 588, 639, 641, 645, 647, 687, 689, 690, 692, 713, 715, 717, 719, 721, 724, 798, 801, 802, 804, 834, 868, 890, 940, 941, 944, 947, 952, 1010, 1011, 1012, 1015, 1016, 1022, 1026, 1027, 1031, 1034, 1046, 1047, 1049, 1050, 1051, 1052, 1053, 1054, 1056, 1058, 1061, 1062, 1063, 1064, 1065, 1068, 1070, 1071, 1073, 1145, 1148, 1149, 1152, 1153, 1155, 1156, 1160, 1161, 1175, 1179, 1183, 1186, 1188, 1189, 1190, 1191, 1193, 1194, 1195, 1196, 1197, 1204, 1205, 1206, 1207, 1212, 1213, 1228, 1229, 1230, 1233, 1234, 1237, 1238, 1239, 1240, 1242, 1243, 1244, 1246, 1247, 1248, 1250, 1251, 1252, 1253, 1255, 1259, 1260, 1262, 1267, 1268, 1269, 1270, 1281, 1282, 1283, 1284, 1287, 1289, 1291, 1292, 1293, 1294, 1295, 1296, 1298, 1299, 1300, 1302, 1304, 1306, 1307, 1344, 1346, 1347, 1348, 1360, 1363, 1366, and 1367, of the Cas9 protein set forth in SEQ ID NO: 5, and wherein the Cas9 fusion polypeptide retains cleavage and/or binding activity relative to the activity of the Cas9 polypeptide without the inserted heterologous amino acid or heterologous polypeptide.

[0058] In some cases, a Cas9 fusion polypeptide of the present disclosure comprises: (a) a Cas9 polypeptide; and (b) a heterologous amino acid or heterologous polypeptide inserted internally within the Cas9 polypeptide, wherein the heterologous amino acid or heterologous polypeptide is inserted at a position that is immediately adjacent and N-terminal to an amino acid residue corresponding to a residue selected from 3, 4, 42, 112, 127, 193, 197, 202, 204, 205, 206, 207, 208, 209, 211, 214, 217, 228, 231, 238, 257, 259, 313, 390, 456, 460, 467, 468, 470, 474, 532, 533, 536, 576, 577, 579, 588, 639, 641, 645, 647, 687, 689, 690, 692, 713, 715, 717, 719, 721, 724, 798, 801, 802, 804, 834, 868, 890, 940, 941, 944, 947, 952, 1010, 1011, 1012, 1015, 1016, 1022, 1026, 1027, 1031, 1034, 1046, 1047, 1049, 1050, 1051, 1052, 1053, 1054, 1056, 1058, 1061, 1062, 1063, 1064, 1065, 1068, 1070, 1071, 1073, 1145, 1148, 1149, 1152, 1153, 1155, 1156, 1160, 1161, 1175, 1179, 1183, 1186, 1188, 1189, 1190, 1191, 1193, 1194, 1195, 1196, 1197, 1204, 1205, 1206, 1207, 1212, 1213, 1228, 1229, 1230, 1233, 1234, 1237, 1238, 1239, 1240, 1242, 1243, 1244, 1246, 1247, 1248, 1250, 1251, 1252, 1253, 1255, 1259, 1260, 1262, 1267, 1268, 1269, 1270, 1281, 1282, 1283, 1284, 1287, 1289, 1291, 1292, 1293, 1294, 1295, 1296, 1298, 1299, 1300, 1302, 1304, 1306, 1307, 1344, 1346, 1347, 1348, 1360, 1363, 1366, and 1367, of the Cas9 protein set forth in SEQ ID NO: 5, and wherein the Cas9 fusion polypeptide retains cleavage and/or binding activity relative to the activity of the Cas9 polypeptide without the inserted heterologous amino acid or heterologous polypeptide.

[0059] In some cases, a Cas9 fusion polypeptide of the present disclosure comprises: (a) a Cas9 polypeptide; and (b) a heterologous amino acid or heterologous polypeptide inserted internally within the Cas9 polypeptide, wherein the heterologous amino acid or heterologous polypeptide is inserted at a position that is immediately adjacent and C-terminal to amino acid 3 of the Cas9 protein set forth in SEQ ID NO:5, or a corresponding amino acid residue in another Cas9 polypeptide; and wherein the Cas9 fusion polypeptide retains cleavage and/or binding activity relative to the activity of the Cas9 polypeptide without the inserted heterologous amino acid or heterologous polypeptide. In some cases, a Cas9 fusion polypeptide of the present disclosure comprises: (a) a Cas9 polypeptide; and (b) a heterologous amino acid or heterologous polypeptide inserted internally within the Cas9 polypeptide, wherein the heterologous amino acid or heterologous polypeptide is inserted at a position that is immediately adjacent and N-terminal to amino acid 3 of the Cas9 protein set forth in SEQ ID NO:5, or a corresponding amino acid residue in another Cas9 polypeptide; and wherein the Cas9 fusion polypeptide retains cleavage and/or binding activity relative to the activity of the Cas9 polypeptide without the inserted heterologous amino acid or heterologous polypeptide. In some cases, the heterologous amino acid or heterologous polypeptide is inserted between residues 2 and 3, or between residues 3 and 4, of the Cas9 protein set forth in SEQ ID NO:5, or a corresponding amino acid residue in another Cas9 polypeptide.

[0060] In some cases, a Cas9 fusion polypeptide of the present disclosure comprises: (a) a Cas9 polypeptide; and (b) a heterologous amino acid or heterologous polypeptide inserted internally within the Cas9 polypeptide, wherein the heterologous amino acid or heterologous polypeptide is inserted at a position that is immediately adjacent and C-terminal to amino acid 4 of the Cas9 protein set forth in SEQ ID NO:5, or a corresponding amino acid residue in another Cas9 polypeptide; and wherein the Cas9 fusion polypeptide retains cleavage and/or binding activity relative to the activity of the Cas9 polypeptide without the inserted heterologous amino acid or heterologous polypeptide. In some cases, a Cas9 fusion polypeptide of the present disclosure comprises: (a) a Cas9 polypeptide; and (b) a heterologous amino acid or heterologous polypeptide inserted internally within the Cas9 polypeptide, wherein the heterologous amino acid or heterologous polypeptide is inserted at a position that is immediately adjacent and N-terminal to amino acid 4 of the Cas9 protein set forth in SEQ ID NO:5, or a corresponding amino acid residue in another Cas9 polypeptide; and wherein the Cas9 fusion polypeptide retains cleavage and/or binding activity relative to the activity of the Cas9 polypeptide without the inserted heterologous amino acid or heterologous polypeptide. In some cases, the heterologous amino acid or heterologous polypeptide is inserted between residues 3 and 4, or between residues 4 and 5, of the Cas9 protein set forth in SEQ ID NO:5, or a corresponding amino acid residue in another Cas9 polypeptide.

[0061] In some cases, a Cas9 fusion polypeptide of the present disclosure comprises: (a) a Cas9 polypeptide; and (b) a heterologous amino acid or heterologous polypeptide inserted internally within the Cas9 polypeptide, wherein the heterologous amino acid or heterologous polypeptide is inserted at a position that is immediately adjacent and C-terminal to amino acid 42 of the Cas9 protein set forth in SEQ ID NO:5, or a corresponding amino acid residue in another Cas9 polypeptide; and wherein the Cas9 fusion polypeptide retains cleavage and/or binding activity relative to the activity of the Cas9 polypeptide without the inserted heterologous amino acid or heterologous polypeptide. In some cases, a Cas9 fusion polypeptide of the present disclosure comprises: (a) a Cas9 polypeptide; and (b) a heterologous amino acid or heterologous polypeptide inserted internally within the Cas9 polypeptide, wherein the heterologous amino acid or heterologous polypeptide is inserted at a position that is immediately adjacent and N-terminal to amino acid 42 of the Cas9 protein set forth in SEQ ID NO:5, or a corresponding amino acid residue in another Cas9 polypeptide; and wherein the Cas9 fusion polypeptide retains cleavage and/or binding activity relative to the activity of the Cas9 polypeptide without the inserted heterologous amino acid or heterologous polypeptide. In some cases, the heterologous amino acid or heterologous polypeptide is inserted between residues 41 and 42, or between residues 42 and 43, of the Cas9 protein set forth in SEQ ID NO:5, or a corresponding amino acid residue in another Cas9 polypeptide.

[0062] In some cases, a Cas9 fusion polypeptide of the present disclosure comprises: (a) a Cas9 polypeptide; and (b) a heterologous amino acid or heterologous polypeptide inserted internally within the Cas9 polypeptide, wherein the heterologous amino acid or heterologous polypeptide is inserted at a position that is immediately adjacent and C-terminal to amino acid 112 of the Cas9 protein set forth in SEQ ID NO:5, or a corresponding amino acid residue in another Cas9 polypeptide; and wherein the Cas9 fusion polypeptide retains cleavage and/or binding activity relative to the activity of the Cas9 polypeptide without the inserted heterologous amino acid or heterologous polypeptide. In some cases, a Cas9 fusion polypeptide of the present disclosure comprises: (a) a Cas9 polypeptide; and (b) a heterologous amino acid or heterologous polypeptide inserted internally within the Cas9 polypeptide, wherein the heterologous amino acid or heterologous polypeptide is inserted at a position that is immediately adjacent and N-terminal to amino acid 112 of the Cas9 protein set forth in SEQ ID NO:5, or a corresponding amino acid residue in another Cas9 polypeptide; and wherein the Cas9 fusion polypeptide retains cleavage and/or binding activity relative to the activity of the Cas9 polypeptide without the inserted heterologous amino acid or heterologous polypeptide. In some cases, the heterologous amino acid or heterologous polypeptide is inserted between residues 111 and 112, or between residues 112 and 113, of the Cas9 protein set forth in SEQ ID NO:5, or a corresponding amino acid residue in another Cas9 polypeptide.

[0063] In some cases, a Cas9 fusion polypeptide of the present disclosure comprises: (a) a Cas9 polypeptide; and (b) a heterologous amino acid or heterologous polypeptide inserted internally within the Cas9 polypeptide, wherein the heterologous amino acid or heterologous polypeptide is inserted at a position that is immediately adjacent and C-terminal to amino acid 127 of the Cas9 protein set forth in SEQ ID NO:5, or a corresponding amino acid residue in another Cas9 polypeptide; and wherein the Cas9 fusion polypeptide retains cleavage and/or binding activity relative to the activity of the Cas9 polypeptide without the inserted heterologous amino acid or heterologous polypeptide. In some cases, a Cas9 fusion polypeptide of the present disclosure comprises: (a) a Cas9 polypeptide; and (b) a heterologous amino acid or heterologous polypeptide inserted internally within the Cas9 polypeptide, wherein the heterologous amino acid or heterologous polypeptide is inserted at a position that is immediately adjacent and N-terminal to amino acid 127 of the Cas9 protein set forth in SEQ ID NO:5, or a corresponding amino acid residue in another Cas9 polypeptide; and wherein the Cas9 fusion polypeptide retains cleavage and/or binding activity relative to the activity of the Cas9 polypeptide without the inserted heterologous amino acid or heterologous polypeptide. In some cases, the heterologous amino acid or heterologous polypeptide is inserted between residues 126 and 127, or between residues 127 and 128, of the Cas9 protein set forth in SEQ ID NO:5, or a corresponding amino acid residue in another Cas9 polypeptide.

[0064] In some cases, a Cas9 fusion polypeptide of the present disclosure comprises: (a) a Cas9 polypeptide; and (b) a heterologous amino acid or heterologous polypeptide inserted internally within the Cas9 polypeptide, wherein the heterologous amino acid or heterologous polypeptide is inserted at a position that is immediately adjacent and C-terminal to amino acid 193 of the Cas9 protein set forth in SEQ ID NO:5, or a corresponding amino acid residue in another Cas9 polypeptide; and wherein the Cas9 fusion polypeptide retains cleavage and/or binding activity relative to the activity of the Cas9 polypeptide without the inserted heterologous amino acid or heterologous polypeptide. In some cases, a Cas9 fusion polypeptide of the present disclosure comprises: (a) a Cas9 polypeptide; and (b) a heterologous amino acid or heterologous polypeptide inserted internally within the Cas9 polypeptide, wherein the heterologous amino acid or heterologous polypeptide is inserted at a position that is immediately adjacent and N-terminal to amino acid 193 of the Cas9 protein set forth in SEQ ID NO:5, or a corresponding amino acid residue in another Cas9 polypeptide; and wherein the Cas9 fusion polypeptide retains cleavage and/or binding activity relative to the activity of the Cas9 polypeptide without the inserted heterologous amino acid or heterologous polypeptide. In some cases, the heterologous amino acid or heterologous polypeptide is inserted between residues 192 and 193, or between residues 193 and 194, of the Cas9 protein set forth in SEQ ID NO:5, or a corresponding amino acid residue in another Cas9 polypeptide.

[0065] In some cases, a Cas9 fusion polypeptide of the present disclosure comprises: (a) a Cas9 polypeptide; and (b) a heterologous amino acid or heterologous polypeptide inserted internally within the Cas9 polypeptide, wherein the heterologous amino acid or heterologous polypeptide is inserted at a position that is immediately adjacent and C-terminal to amino acid 197 of the Cas9 protein set forth in SEQ ID NO:5, or a corresponding amino acid residue in another Cas9 polypeptide; and wherein the Cas9 fusion polypeptide retains cleavage and/or binding activity relative to the activity of the Cas9 polypeptide without the inserted heterologous amino acid or heterologous polypeptide. In some cases, a Cas9 fusion polypeptide of the present disclosure comprises: (a) a Cas9 polypeptide; and (b) a heterologous amino acid or heterologous polypeptide inserted internally within the Cas9 polypeptide, wherein the heterologous amino acid or heterologous polypeptide is inserted at a position that is immediately adjacent and N-terminal to amino acid 197 of the Cas9 protein set forth in SEQ ID NO:5, or a corresponding amino acid residue in another Cas9 polypeptide; and wherein the Cas9 fusion polypeptide retains cleavage and/or binding activity relative to the activity of the Cas9 polypeptide without the inserted heterologous amino acid or heterologous polypeptide. In some cases, the heterologous amino acid or heterologous polypeptide is inserted between residues 196 and 197, or between residues 197 and 198, of the Cas9 protein set forth in SEQ ID NO:5, or a corresponding amino acid residue in another Cas9 polypeptide.

[0066] In some cases, a Cas9 fusion polypeptide of the present disclosure comprises: (a) a Cas9 polypeptide; and (b) a heterologous amino acid or heterologous polypeptide inserted internally within the Cas9 polypeptide, wherein the heterologous amino acid or heterologous polypeptide is inserted at a position that is immediately adjacent and C-terminal to amino acid 202 of the Cas9 protein set forth in SEQ ID NO:5, or a corresponding amino acid residue in another Cas9 polypeptide; and wherein the Cas9 fusion polypeptide retains cleavage and/or binding activity relative to the activity of the Cas9 polypeptide without the inserted heterologous amino acid or heterologous polypeptide. In some cases, a Cas9 fusion polypeptide of the present disclosure comprises: (a) a Cas9 polypeptide; and (b) a heterologous amino acid or heterologous polypeptide inserted internally within the Cas9 polypeptide, wherein the heterologous amino acid or heterologous polypeptide is inserted at a position that is immediately adjacent and N-terminal to amino acid 202 of the Cas9 protein set forth in SEQ ID NO:5, or a corresponding amino acid residue in another Cas9 polypeptide; and wherein the Cas9 fusion polypeptide retains cleavage and/or binding activity relative to the activity of the Cas9 polypeptide without the inserted heterologous amino acid or heterologous polypeptide. In some cases, the heterologous amino acid or heterologous polypeptide is inserted between residues 201 and 202, or between residues 202 and 203, of the Cas9 protein set forth in SEQ ID NO:5, or a corresponding amino acid residue in another Cas9 polypeptide.

[0067] In some cases, a Cas9 fusion polypeptide of the present disclosure comprises: (a) a Cas9 polypeptide; and (b) a heterologous amino acid or heterologous polypeptide inserted internally within the Cas9 polypeptide, wherein the heterologous amino acid or heterologous polypeptide is inserted at a position that is immediately adjacent and C-terminal to amino acid 204 of the Cas9 protein set forth in SEQ ID NO:5, or a corresponding amino acid residue in another Cas9 polypeptide; and wherein the Cas9 fusion polypeptide retains cleavage and/or binding activity relative to the activity of the Cas9 polypeptide without the inserted heterologous amino acid or heterologous polypeptide. In some cases, a Cas9 fusion polypeptide of the present disclosure comprises: (a) a Cas9 polypeptide; and (b) a heterologous amino acid or heterologous polypeptide inserted internally within the Cas9 polypeptide, wherein the heterologous amino acid or heterologous polypeptide is inserted at a position that is immediately adjacent and N-terminal to amino acid 204 of the Cas9 protein set forth in SEQ ID NO:5, or a corresponding amino acid residue in another Cas9 polypeptide; and wherein the Cas9 fusion polypeptide retains cleavage and/or binding activity relative to the activity of the Cas9 polypeptide without the inserted heterologous amino acid or heterologous polypeptide. In some cases, the heterologous amino acid or heterologous polypeptide is inserted between residues 203 and 204, or between residues 204 and 205, of the Cas9 protein set forth in SEQ ID NO:5, or a corresponding amino acid residue in another Cas9 polypeptide.

[0068] In some cases, a Cas9 fusion polypeptide of the present disclosure comprises: (a) a Cas9 polypeptide; and (b) a heterologous amino acid or heterologous polypeptide inserted internally within the Cas9 polypeptide, wherein the heterologous amino acid or heterologous polypeptide is inserted at a position that is immediately adjacent and C-terminal to amino acid 205 of the Cas9 protein set forth in SEQ ID NO:5, or a corresponding amino acid residue in another Cas9 polypeptide; and wherein the Cas9 fusion polypeptide retains cleavage and/or binding activity relative to the activity of the Cas9 polypeptide without the inserted heterologous amino acid or heterologous polypeptide. In some cases, a Cas9 fusion polypeptide of the present disclosure comprises: (a) a Cas9 polypeptide; and (b) a heterologous amino acid or heterologous polypeptide inserted internally within the Cas9 polypeptide, wherein the heterologous amino acid or heterologous polypeptide is inserted at a position that is immediately adjacent and N-terminal to amino acid 205 of the Cas9 protein set forth in SEQ ID NO:5, or a corresponding amino acid residue in another Cas9 polypeptide; and wherein the Cas9 fusion polypeptide retains cleavage and/or binding activity relative to the activity of the Cas9 polypeptide without the inserted heterologous amino acid or heterologous polypeptide. In some cases, the heterologous amino acid or heterologous polypeptide is inserted between residues 204 and 205, or between residues 205 and 206, of the Cas9 protein set forth in SEQ ID NO:5, or a corresponding amino acid residue in another Cas9 polypeptide.

[0069] In some cases, a Cas9 fusion polypeptide of the present disclosure comprises: (a) a Cas9 polypeptide; and (b) a heterologous amino acid or heterologous polypeptide inserted internally within the Cas9 polypeptide, wherein the heterologous amino acid or heterologous polypeptide is inserted at a position that is immediately adjacent and C-terminal to amino acid 206 of the Cas9 protein set forth in SEQ ID NO:5, or a corresponding amino acid residue in another Cas9 polypeptide; and wherein the Cas9 fusion polypeptide retains cleavage and/or binding activity relative to the activity of the Cas9 polypeptide without the inserted heterologous amino acid or heterologous polypeptide. In some cases, a Cas9 fusion polypeptide of the present disclosure comprises: (a) a Cas9 polypeptide; and (b) a heterologous amino acid or heterologous polypeptide inserted internally within the Cas9 polypeptide, wherein the heterologous amino acid or heterologous polypeptide is inserted at a position that is immediately adjacent and N-terminal to amino acid 206 of the Cas9 protein set forth in SEQ ID NO:5, or a corresponding amino acid residue in another Cas9 polypeptide; and wherein the Cas9 fusion polypeptide retains cleavage and/or binding activity relative to the activity of the Cas9 polypeptide without the inserted heterologous amino acid or heterologous polypeptide. In some cases, the heterologous amino acid or heterologous polypeptide is inserted between residues 205 and 206, or between residues 206 and 207, of the Cas9 protein set forth in SEQ ID NO:5, or a corresponding amino acid residue in another Cas9 polypeptide.

[0070] In some cases, a Cas9 fusion polypeptide of the present disclosure comprises: (a) a Cas9 polypeptide; and (b) a heterologous amino acid or heterologous polypeptide inserted internally within the Cas9 polypeptide, wherein the heterologous amino acid or heterologous polypeptide is inserted at a position that is immediately adjacent and C-terminal to amino acid 207 of the Cas9 protein set forth in SEQ ID NO:5, or a corresponding amino acid residue in another Cas9 polypeptide; and wherein the Cas9 fusion polypeptide retains cleavage and/or binding activity relative to the activity of the Cas9 polypeptide without the inserted heterologous amino acid or heterologous polypeptide. In some cases, a Cas9 fusion polypeptide of the present disclosure comprises: (a) a Cas9 polypeptide; and (b) a heterologous amino acid or heterologous polypeptide inserted internally within the Cas9 polypeptide, wherein the heterologous amino acid or heterologous polypeptide is inserted at a position that is immediately adjacent and N-terminal to amino acid 207 of the Cas9 protein set forth in SEQ ID NO:5, or a corresponding amino acid residue in another Cas9 polypeptide; and wherein the Cas9 fusion polypeptide retains cleavage and/or binding activity relative to the activity of the Cas9 polypeptide without the inserted heterologous amino acid or heterologous polypeptide. In some cases, the heterologous amino acid or heterologous polypeptide is inserted between residues 206 and 207, or between residues 207 and 208, of the Cas9 protein set forth in SEQ ID NO:5, or a corresponding amino acid residue in another Cas9 polypeptide.

[0071] In some cases, a Cas9 fusion polypeptide of the present disclosure comprises: (a) a Cas9 polypeptide; and (b) a heterologous amino acid or heterologous polypeptide inserted internally within the Cas9 polypeptide, wherein the heterologous amino acid or heterologous polypeptide is inserted at a position that is immediately adjacent and C-terminal to amino acid 208 of the Cas9 protein set forth in SEQ ID NO:5, or a corresponding amino acid residue in another Cas9 polypeptide; and wherein the Cas9 fusion polypeptide retains cleavage and/or binding activity relative to the activity of the Cas9 polypeptide without the inserted heterologous amino acid or heterologous polypeptide. In some cases, a Cas9 fusion polypeptide of the present disclosure comprises: (a) a Cas9 polypeptide; and (b) a heterologous amino acid or heterologous polypeptide inserted internally within the Cas9 polypeptide, wherein the heterologous amino acid or heterologous polypeptide is inserted at a position that is immediately adjacent and N-terminal to amino acid 208 of the Cas9 protein set forth in SEQ ID NO:5, or a corresponding amino acid residue in another Cas9 polypeptide; and wherein the Cas9 fusion polypeptide retains cleavage and/or binding activity relative to the activity of the Cas9 polypeptide without the inserted heterologous amino acid or heterologous polypeptide. In some cases, the heterologous amino acid or heterologous polypeptide is inserted between residues 207 and 208, or between residues 208 and 209, of the Cas9 protein set forth in SEQ ID NO:5, or a corresponding amino acid residue in another Cas9 polypeptide.

[0072] In some cases, a Cas9 fusion polypeptide of the present disclosure comprises: (a) a Cas9 polypeptide; and (b) a heterologous amino acid or heterologous polypeptide inserted internally within the Cas9 polypeptide, wherein the heterologous amino acid or heterologous polypeptide is inserted at a position that is immediately adjacent and C-terminal to amino acid 209 of the Cas9 protein set forth in SEQ ID NO:5, or a corresponding amino acid residue in another Cas9 polypeptide; and wherein the Cas9 fusion polypeptide retains cleavage and/or binding activity relative to the activity of the Cas9 polypeptide without the inserted heterologous amino acid or heterologous polypeptide. In some cases, a Cas9 fusion polypeptide of the present disclosure comprises: (a) a Cas9 polypeptide; and (b) a heterologous amino acid or heterologous polypeptide inserted internally within the Cas9 polypeptide, wherein the heterologous amino acid or heterologous polypeptide is inserted at a position that is immediately adjacent and N-terminal to amino acid 209 of the Cas9 protein set forth in SEQ ID NO:5, or a corresponding amino acid residue in another Cas9 polypeptide; and wherein the Cas9 fusion polypeptide retains cleavage and/or binding activity relative to the activity of the Cas9 polypeptide without the inserted heterologous amino acid or heterologous polypeptide. In some cases, the heterologous amino acid or heterologous polypeptide is inserted between residues 208 and 209, or between residues 209 and 210, of the Cas9 protein set forth in SEQ ID NO:5, or a corresponding amino acid residue in another Cas9 polypeptide.

[0073] In some cases, a Cas9 fusion polypeptide of the present disclosure comprises: (a) a Cas9 polypeptide; and (b) a heterologous amino acid or heterologous polypeptide inserted internally within the Cas9 polypeptide, wherein the heterologous amino acid or heterologous polypeptide is inserted at a position that is immediately adjacent and C-terminal to amino acid 211 of the Cas9 protein set forth in SEQ ID NO:5, or a corresponding amino acid residue in another Cas9 polypeptide; and wherein the Cas9 fusion polypeptide retains cleavage and/or binding activity relative to the activity of the Cas9 polypeptide without the inserted heterologous amino acid or heterologous polypeptide. In some cases, a Cas9 fusion polypeptide of the present disclosure comprises: (a) a Cas9 polypeptide; and (b) a heterologous amino acid or heterologous polypeptide inserted internally within the Cas9 polypeptide, wherein the heterologous amino acid or heterologous polypeptide is inserted at a position that is immediately adjacent and N-terminal to amino acid 211 of the Cas9 protein set forth in SEQ ID NO:5, or a corresponding amino acid residue in another Cas9 polypeptide; and wherein the Cas9 fusion polypeptide retains cleavage and/or binding activity relative to the activity of the Cas9 polypeptide without the inserted heterologous amino acid or heterologous polypeptide. In some cases, the heterologous amino acid or heterologous polypeptide is inserted between residues 210 and 211, or between residues 211 and 212, of the Cas9 protein set forth in SEQ ID NO:5, or a corresponding amino acid residue in another Cas9 polypeptide.

[0074] In some cases, a Cas9 fusion polypeptide of the present disclosure comprises: (a) a Cas9 polypeptide; and (b) a heterologous amino acid or heterologous polypeptide inserted internally within the Cas9 polypeptide, wherein the heterologous amino acid or heterologous polypeptide is inserted at a position that is immediately adjacent and C-terminal to amino acid 214 of the Cas9 protein set forth in SEQ ID NO:5, or a corresponding amino acid residue in another Cas9 polypeptide; and wherein the Cas9 fusion polypeptide retains cleavage and/or binding activity relative to the activity of the Cas9 polypeptide without the inserted heterologous amino acid or heterologous polypeptide. In some cases, a Cas9 fusion polypeptide of the present disclosure comprises: (a) a Cas9 polypeptide; and (b) a heterologous amino acid or heterologous polypeptide inserted internally within the Cas9 polypeptide, wherein the heterologous amino acid or heterologous polypeptide is inserted at a position that is immediately adjacent and N-terminal to amino acid 214 of the Cas9 protein set forth in SEQ ID NO:5, or a corresponding amino acid residue in another Cas9 polypeptide; and wherein the Cas9 fusion polypeptide retains cleavage and/or binding activity relative to the activity of the Cas9 polypeptide without the inserted heterologous amino acid or heterologous polypeptide. In some cases, the heterologous amino acid or heterologous polypeptide is inserted between residues 213 and 214, or between residues 214 and 215, of the Cas9 protein set forth in SEQ ID NO:5, or a corresponding amino acid residue in another Cas9 polypeptide.

[0075] In some cases, a Cas9 fusion polypeptide of the present disclosure comprises: (a) a Cas9 polypeptide; and (b) a heterologous amino acid or heterologous polypeptide inserted internally within the Cas9 polypeptide, wherein the heterologous amino acid or heterologous polypeptide is inserted at a position that is immediately adjacent and C-terminal to amino acid 217 of the Cas9 protein set forth in SEQ ID NO:5, or a corresponding amino acid residue in another Cas9 polypeptide; and wherein the Cas9 fusion polypeptide retains cleavage and/or binding activity relative to the activity of the Cas9 polypeptide without the inserted heterologous amino acid or heterologous polypeptide. In some cases, a Cas9 fusion polypeptide of the present disclosure comprises: (a) a Cas9 polypeptide; and (b) a heterologous amino acid or heterologous polypeptide inserted internally within the Cas9 polypeptide, wherein the heterologous amino acid or heterologous polypeptide is inserted at a position that is immediately adjacent and N-terminal to amino acid 217 of the Cas9 protein set forth in SEQ ID NO:5, or a corresponding amino acid residue in another Cas9 polypeptide; and wherein the Cas9 fusion polypeptide retains cleavage and/or binding activity relative to the activity of the Cas9 polypeptide without the inserted heterologous amino acid or heterologous polypeptide. In some cases, the heterologous amino acid or heterologous polypeptide is inserted between residues 216 and 217, or between residues 217 and 218, of the Cas9 protein set forth in SEQ ID NO:5, or a corresponding amino acid residue in another Cas9 polypeptide.

[0076] In some cases, a Cas9 fusion polypeptide of the present disclosure comprises: (a) a Cas9 polypeptide; and (b) a heterologous amino acid or heterologous polypeptide inserted internally within the Cas9 polypeptide, wherein the heterologous amino acid or heterologous polypeptide is inserted at a position that is immediately adjacent and C-terminal to amino acid 228 of the Cas9 protein set forth in SEQ ID NO:5, or a corresponding amino acid residue in another Cas9 polypeptide; and wherein the Cas9 fusion polypeptide retains cleavage and/or binding activity relative to the activity of the Cas9 polypeptide without the inserted heterologous amino acid or heterologous polypeptide. In some cases, a Cas9 fusion polypeptide of the present disclosure comprises: (a) a Cas9 polypeptide; and (b) a heterologous amino acid or heterologous polypeptide inserted internally within the Cas9 polypeptide, wherein the heterologous amino acid or heterologous polypeptide is inserted at a position that is immediately adjacent and N-terminal to amino acid 228 of the Cas9 protein set forth in SEQ ID NO:5, or a corresponding amino acid residue in another Cas9 polypeptide; and wherein the Cas9 fusion polypeptide retains cleavage and/or binding activity relative to the activity of the Cas9 polypeptide without the inserted heterologous amino acid or heterologous polypeptide. In some cases, the heterologous amino acid or heterologous polypeptide is inserted between residues 227 and 228, or between residues 228 and 229, of the Cas9 protein set forth in SEQ ID NO:5, or a corresponding amino acid residue in another Cas9 polypeptide.

[0077] In some cases, a Cas9 fusion polypeptide of the present disclosure comprises: (a) a Cas9 polypeptide; and (b) a heterologous amino acid or heterologous polypeptide inserted internally within the Cas9 polypeptide, wherein the heterologous amino acid or heterologous polypeptide is inserted at a position that is immediately adjacent and C-terminal to amino acid 231 of the Cas9 protein set forth in SEQ ID NO:5, or a corresponding amino acid residue in another Cas9 polypeptide; and wherein the Cas9 fusion polypeptide retains cleavage and/or binding activity relative to the activity of the Cas9 polypeptide without the inserted heterologous amino acid or heterologous polypeptide. In some cases, a Cas9 fusion polypeptide of the present disclosure comprises: (a) a Cas9 polypeptide; and (b) a heterologous amino acid or heterologous polypeptide inserted internally within the Cas9 polypeptide, wherein the heterologous amino acid or heterologous polypeptide is inserted at a position that is immediately adjacent and N-terminal to amino acid 231 of the Cas9 protein set forth in SEQ ID NO:5, or a corresponding amino acid residue in another Cas9 polypeptide; and wherein the Cas9 fusion polypeptide retains cleavage and/or binding activity relative to the activity of the Cas9 polypeptide without the inserted heterologous amino acid or heterologous polypeptide. In some cases, the heterologous amino acid or heterologous polypeptide is inserted between residues 230 and 231, or between residues 231 and 232, of the Cas9 protein set forth in SEQ ID NO:5, or a corresponding amino acid residue in another Cas9 polypeptide.

[0078] In some cases, a Cas9 fusion polypeptide of the present disclosure comprises: (a) a Cas9 polypeptide; and (b) a heterologous amino acid or heterologous polypeptide inserted internally within the Cas9 polypeptide, wherein the heterologous amino acid or heterologous polypeptide is inserted at a position that is immediately adjacent and C-terminal to amino acid 238 of the Cas9 protein set forth in SEQ ID NO:5, or a corresponding amino acid residue in another Cas9 polypeptide; and wherein the Cas9 fusion polypeptide retains cleavage and/or binding activity relative to the activity of the Cas9 polypeptide without the inserted heterologous amino acid or heterologous polypeptide. In some cases, a Cas9 fusion polypeptide of the present disclosure comprises: (a) a Cas9 polypeptide; and (b) a heterologous amino acid or heterologous polypeptide inserted internally within the Cas9 polypeptide, wherein the heterologous amino acid or heterologous polypeptide is inserted at a position that is immediately adjacent and N-terminal to amino acid 238 of the Cas9 protein set forth in SEQ ID NO:5, or a corresponding amino acid residue in another Cas9 polypeptide; and wherein the Cas9 fusion polypeptide retains cleavage and/or binding activity relative to the activity of the Cas9 polypeptide without the inserted heterologous amino acid or heterologous polypeptide. In some cases, the heterologous amino acid or heterologous polypeptide is inserted between residues 237 and 238, or between residues 238 and 239, of the Cas9 protein set forth in SEQ ID NO:5, or a corresponding amino acid residue in another Cas9 polypeptide.

[0079] In some cases, a Cas9 fusion polypeptide of the present disclosure comprises: (a) a Cas9 polypeptide; and (b) a heterologous amino acid or heterologous polypeptide inserted internally within the Cas9 polypeptide, wherein the heterologous amino acid or heterologous polypeptide is inserted at a position that is immediately adjacent and C-terminal to amino acid 257 of the Cas9 protein set forth in SEQ ID NO:5, or a corresponding amino acid residue in another Cas9 polypeptide; and wherein the Cas9 fusion polypeptide retains cleavage and/or binding activity relative to the activity of the Cas9 polypeptide without the inserted heterologous amino acid or heterologous polypeptide. In some cases, a Cas9 fusion polypeptide of the present disclosure comprises: (a) a Cas9 polypeptide; and (b) a heterologous amino acid or heterologous polypeptide inserted internally within the Cas9 polypeptide, wherein the heterologous amino acid or heterologous polypeptide is inserted at a position that is immediately adjacent and N-terminal to amino acid 257 of the Cas9 protein set forth in SEQ ID NO:5, or a corresponding amino acid residue in another Cas9 polypeptide; and wherein the Cas9 fusion polypeptide retains cleavage and/or binding activity relative to the activity of the Cas9 polypeptide without the inserted heterologous amino acid or heterologous polypeptide. In some cases, the heterologous amino acid or heterologous polypeptide is inserted between residues 257 and 257, or between residues 257 and 258, of the Cas9 protein set forth in SEQ ID NO:5, or a corresponding amino acid residue in another Cas9 polypeptide.

[0080] In some cases, a Cas9 fusion polypeptide of the present disclosure comprises: (a) a Cas9 polypeptide; and (b) a heterologous amino acid or heterologous polypeptide inserted internally within the Cas9 polypeptide, wherein the heterologous amino acid or heterologous polypeptide is inserted at a position that is immediately adjacent and C-terminal to amino acid 259 of the Cas9 protein set forth in SEQ ID NO:5, or a corresponding amino acid residue in another Cas9 polypeptide; and wherein the Cas9 fusion polypeptide retains cleavage and/or binding activity relative to the activity of the Cas9 polypeptide without the inserted heterologous amino acid or heterologous polypeptide. In some cases, a Cas9 fusion polypeptide of the present disclosure comprises: (a) a Cas9 polypeptide; and (b) a heterologous amino acid or heterologous polypeptide inserted internally within the Cas9 polypeptide, wherein the heterologous amino acid or heterologous polypeptide is inserted at a position that is immediately adjacent and N-terminal to amino acid 259 of the Cas9 protein set forth in SEQ ID NO:5, or a corresponding amino acid residue in another Cas9 polypeptide; and wherein the Cas9 fusion polypeptide retains cleavage and/or binding activity relative to the activity of the Cas9 polypeptide without the inserted heterologous amino acid or heterologous polypeptide. In some cases, the heterologous amino acid or heterologous polypeptide is inserted between residues 258 and 259, or between residues 259 and 260, of the Cas9 protein set forth in SEQ ID NO:5, or a corresponding amino acid residue in another Cas9 polypeptide.

[0081] In some cases, a Cas9 fusion polypeptide of the present disclosure comprises: (a) a Cas9 polypeptide; and (b) a heterologous amino acid or heterologous polypeptide inserted internally within the Cas9 polypeptide, wherein the heterologous amino acid or heterologous polypeptide is inserted at a position that is immediately adjacent and C-terminal to amino acid 313 of the Cas9 protein set forth in SEQ ID NO:5, or a corresponding amino acid residue in another Cas9 polypeptide; and wherein the Cas9 fusion polypeptide retains cleavage and/or binding activity relative to the activity of the Cas9 polypeptide without the inserted heterologous amino acid or heterologous polypeptide. In some cases, a Cas9 fusion polypeptide of the present disclosure comprises: (a) a Cas9 polypeptide; and (b) a heterologous amino acid or heterologous polypeptide inserted internally within the Cas9 polypeptide, wherein the heterologous amino acid or heterologous polypeptide is inserted at a position that is immediately adjacent and N-terminal to amino acid 313 of the Cas9 protein set forth in SEQ ID NO:5, or a corresponding amino acid residue in another Cas9 polypeptide; and wherein the Cas9 fusion polypeptide retains cleavage and/or binding activity relative to the activity of the Cas9 polypeptide without the inserted heterologous amino acid or heterologous polypeptide. In some cases, the heterologous amino acid or heterologous polypeptide is inserted between residues 312 and 313, or between residues 313 and 314, of the Cas9 protein set forth in SEQ ID NO:5, or a corresponding amino acid residue in another Cas9 polypeptide.

[0082] In some cases, a Cas9 fusion polypeptide of the present disclosure comprises: (a) a Cas9 polypeptide; and (b) a heterologous amino acid or heterologous polypeptide inserted internally within the Cas9 polypeptide, wherein the heterologous amino acid or heterologous polypeptide is inserted at a position that is immediately adjacent and C-terminal to amino acid 390 of the Cas9 protein set forth in SEQ ID NO:5, or a corresponding amino acid residue in another Cas9 polypeptide; and wherein the Cas9 fusion polypeptide retains cleavage and/or binding activity relative to the activity of the Cas9 polypeptide without the inserted heterologous amino acid or heterologous polypeptide. In some cases, a Cas9 fusion polypeptide of the present disclosure comprises: (a) a Cas9 polypeptide; and (b) a heterologous amino acid or heterologous polypeptide inserted internally within the Cas9 polypeptide, wherein the heterologous amino acid or heterologous polypeptide is inserted at a position that is immediately adjacent and N-terminal to amino acid 390 of the Cas9 protein set forth in SEQ ID NO:5, or a corresponding amino acid residue in another Cas9 polypeptide; and wherein the Cas9 fusion polypeptide retains cleavage and/or binding activity relative to the activity of the Cas9 polypeptide without the inserted heterologous amino acid or heterologous polypeptide. In some cases, the heterologous amino acid or heterologous polypeptide is inserted between residues 389 and 390, or between residues 390 and 391, of the Cas9 protein set forth in SEQ ID NO:5, or a corresponding amino acid residue in another Cas9 polypeptide.

[0083] In some cases, a Cas9 fusion polypeptide of the present disclosure comprises: (a) a Cas9 polypeptide; and (b) a heterologous amino acid or heterologous polypeptide inserted internally within the Cas9 polypeptide, wherein the heterologous amino acid or heterologous polypeptide is inserted at a position that is immediately adjacent and C-terminal to amino acid 456 of the Cas9 protein set forth in SEQ ID NO:5, or a corresponding amino acid residue in another Cas9 polypeptide; and wherein the Cas9 fusion polypeptide retains cleavage and/or binding activity relative to the activity of the Cas9 polypeptide without the inserted heterologous amino acid or heterologous polypeptide. In some cases, a Cas9 fusion polypeptide of the present disclosure comprises: (a) a Cas9 polypeptide; and (b) a heterologous amino acid or heterologous polypeptide inserted internally within the Cas9 polypeptide, wherein the heterologous amino acid or heterologous polypeptide is inserted at a position that is immediately adjacent and N-terminal to amino acid 456 of the Cas9 protein set forth in SEQ ID NO:5, or a corresponding amino acid residue in another Cas9 polypeptide; and wherein the Cas9 fusion polypeptide retains cleavage and/or binding activity relative to the activity of the Cas9 polypeptide without the inserted heterologous amino acid or heterologous polypeptide. In some cases, the heterologous amino acid or heterologous polypeptide is inserted between residues 455 and 456, or between residues 456 and 457, of the Cas9 protein set forth in SEQ ID NO:5, or a corresponding amino acid residue in another Cas9 polypeptide.

[0084] In some cases, a Cas9 fusion polypeptide of the present disclosure comprises: (a) a Cas9 polypeptide; and (b) a heterologous amino acid or heterologous polypeptide inserted internally within the Cas9 polypeptide, wherein the heterologous amino acid or heterologous polypeptide is inserted at a position that is immediately adjacent and C-terminal to amino acid 460 of the Cas9 protein set forth in SEQ ID NO:5, or a corresponding amino acid residue in another Cas9 polypeptide; and wherein the Cas9 fusion polypeptide retains cleavage and/or binding activity relative to the activity of the Cas9 polypeptide without the inserted heterologous amino acid or heterologous polypeptide. In some cases, a Cas9 fusion polypeptide of the present disclosure comprises: (a) a Cas9 polypeptide; and (b) a heterologous amino acid or heterologous polypeptide inserted internally within the Cas9 polypeptide, wherein the heterologous amino acid or heterologous polypeptide is inserted at a position that is immediately adjacent and N-terminal to amino acid 460 of the Cas9 protein set forth in SEQ ID NO:5, or a corresponding amino acid residue in another Cas9 polypeptide; and wherein the Cas9 fusion polypeptide retains cleavage and/or binding activity relative to the activity of the Cas9 polypeptide without the inserted heterologous amino acid or heterologous polypeptide. In some cases, the heterologous amino acid or heterologous polypeptide is inserted between residues 459 and 460, or between residues 460 and 461, of the Cas9 protein set forth in SEQ ID NO:5, or a corresponding amino acid residue in another Cas9 polypeptide.

[0085] In some cases, a Cas9 fusion polypeptide of the present disclosure comprises: (a) a Cas9 polypeptide; and (b) a heterologous amino acid or heterologous polypeptide inserted internally within the Cas9 polypeptide, wherein the heterologous amino acid or heterologous polypeptide is inserted at a position that is immediately adjacent and C-terminal to amino acid 467 of the Cas9 protein set forth in SEQ ID NO:5, or a corresponding amino acid residue in another Cas9 polypeptide; and wherein the Cas9 fusion polypeptide retains cleavage and/or binding activity relative to the activity of the Cas9 polypeptide without the inserted heterologous amino acid or heterologous polypeptide. In some cases, a Cas9 fusion polypeptide of the present disclosure comprises: (a) a Cas9 polypeptide; and (b) a heterologous amino acid or heterologous polypeptide inserted internally within the Cas9 polypeptide, wherein the heterologous amino acid or heterologous polypeptide is inserted at a position that is immediately adjacent and N-terminal to amino acid 467 of the Cas9 protein set forth in SEQ ID NO:5, or a corresponding amino acid residue in another Cas9 polypeptide; and wherein the Cas9 fusion polypeptide retains cleavage and/or binding activity relative to the activity of the Cas9 polypeptide without the inserted heterologous amino acid or heterologous polypeptide. In some cases, the heterologous amino acid or heterologous polypeptide is inserted between residues 466 and 467, or between residues 467 and 468, of the Cas9 protein set forth in SEQ ID NO:5, or a corresponding amino acid residue in another Cas9 polypeptide.

[0086] In some cases, a Cas9 fusion polypeptide of the present disclosure comprises: (a) a Cas9 polypeptide; and (b) a heterologous amino acid or heterologous polypeptide inserted internally within the Cas9 polypeptide, wherein the heterologous amino acid or heterologous polypeptide is inserted at a position that is immediately adjacent and C-terminal to amino acid 468 of the Cas9 protein set forth in SEQ ID NO:5, or a corresponding amino acid residue in another Cas9 polypeptide; and wherein the Cas9 fusion polypeptide retains cleavage and/or binding activity relative to the activity of the Cas9 polypeptide without the inserted heterologous amino acid or heterologous polypeptide. In some cases, a Cas9 fusion polypeptide of the present disclosure comprises: (a) a Cas9 polypeptide; and (b) a heterologous amino acid or heterologous polypeptide inserted internally within the Cas9 polypeptide, wherein the heterologous amino acid or heterologous polypeptide is inserted at a position that is immediately adjacent and N-terminal to amino acid 468 of the Cas9 protein set forth in SEQ ID NO:5, or a corresponding amino acid residue in another Cas9 polypeptide; and wherein the Cas9 fusion polypeptide retains cleavage and/or binding activity relative to the activity of the Cas9 polypeptide without the inserted heterologous amino acid or heterologous polypeptide. In some cases, the heterologous amino acid or heterologous polypeptide is inserted between residues 467 and 468, or between residues 468 and 469, of the Cas9 protein set forth in SEQ ID NO:5, or a corresponding amino acid residue in another Cas9 polypeptide.

[0087] In some cases, a Cas9 fusion polypeptide of the present disclosure comprises: (a) a Cas9 polypeptide; and (b) a heterologous amino acid or heterologous polypeptide inserted internally within the Cas9 polypeptide, wherein the heterologous amino acid or heterologous polypeptide is inserted at a position that is immediately adjacent and C-terminal to amino acid 470 of the Cas9 protein set forth in SEQ ID NO:5, or a corresponding amino acid residue in another Cas9 polypeptide; and wherein the Cas9 fusion polypeptide retains cleavage and/or binding activity relative to the activity of the Cas9 polypeptide without the inserted heterologous amino acid or heterologous polypeptide. In some cases, a Cas9 fusion polypeptide of the present disclosure comprises: (a) a Cas9 polypeptide; and (b) a heterologous amino acid or heterologous polypeptide inserted internally within the Cas9 polypeptide, wherein the heterologous amino acid or heterologous polypeptide is inserted at a position that is immediately adjacent and N-terminal to amino acid 470 of the Cas9 protein set forth in SEQ ID NO:5, or a corresponding amino acid residue in another Cas9 polypeptide; and wherein the Cas9 fusion polypeptide retains cleavage and/or binding activity relative to the activity of the Cas9 polypeptide without the inserted heterologous amino acid or heterologous polypeptide. In some cases, the heterologous amino acid or heterologous polypeptide is inserted between residues 469 and 470, or between residues 470 and 471, of the Cas9 protein set forth in SEQ ID NO:5, or a corresponding amino acid residue in another Cas9 polypeptide.

[0088] In some cases, a Cas9 fusion polypeptide of the present disclosure comprises: (a) a Cas9 polypeptide; and (b) a heterologous amino acid or heterologous polypeptide inserted internally within the Cas9 polypeptide, wherein the heterologous amino acid or heterologous polypeptide is inserted at a position that is immediately adjacent and C-terminal to amino acid 474 of the Cas9 protein set forth in SEQ ID NO:5, or a corresponding amino acid residue in another Cas9 polypeptide; and wherein the Cas9 fusion polypeptide retains cleavage and/or binding activity relative to the activity of the Cas9 polypeptide without the inserted heterologous amino acid or heterologous polypeptide. In some cases, a Cas9 fusion polypeptide of the present disclosure comprises: (a) a Cas9 polypeptide; and (b) a heterologous amino acid or heterologous polypeptide inserted internally within the Cas9 polypeptide, wherein the heterologous amino acid or heterologous polypeptide is inserted at a position that is immediately adjacent and N-terminal to amino acid 474 of the Cas9 protein set forth in SEQ ID NO:5, or a corresponding amino acid residue in another Cas9 polypeptide; and wherein the Cas9 fusion polypeptide retains cleavage and/or binding activity relative to the activity of the Cas9 polypeptide without the inserted heterologous amino acid or heterologous polypeptide. In some cases, the heterologous amino acid or heterologous polypeptide is inserted between residues 473 and 474, or between residues 474 and 475, of the Cas9 protein set forth in SEQ ID NO:5, or a corresponding amino acid residue in another Cas9 polypeptide.

[0089] In some cases, a Cas9 fusion polypeptide of the present disclosure comprises: (a) a Cas9 polypeptide; and (b) a heterologous amino acid or heterologous polypeptide inserted internally within the Cas9 polypeptide, wherein the heterologous amino acid or heterologous polypeptide is inserted at a position that is immediately adjacent and C-terminal to amino acid 532 of the Cas9 protein set forth in SEQ ID NO:5, or a corresponding amino acid residue in another Cas9 polypeptide; and wherein the Cas9 fusion polypeptide retains cleavage and/or binding activity relative to the activity of the Cas9 polypeptide without the inserted heterologous amino acid or heterologous polypeptide. In some cases, a Cas9 fusion polypeptide of the present disclosure comprises: (a) a Cas9 polypeptide; and (b) a heterologous amino acid or heterologous polypeptide inserted internally within the Cas9 polypeptide, wherein the heterologous amino acid or heterologous polypeptide is inserted at a position that is immediately adjacent and N-terminal to amino acid 532 of the Cas9 protein set forth in SEQ ID NO:5, or a corresponding amino acid residue in another Cas9 polypeptide; and wherein the Cas9 fusion polypeptide retains cleavage and/or binding activity relative to the activity of the Cas9 polypeptide without the inserted heterologous amino acid or heterologous polypeptide. In some cases, the heterologous amino acid or heterologous polypeptide is inserted between residues 531 and 532, or between residues 532 and 533, of the Cas9 protein set forth in SEQ ID NO:5, or a corresponding amino acid residue in another Cas9 polypeptide.

[0090] In some cases, a Cas9 fusion polypeptide of the present disclosure comprises: (a) a Cas9 polypeptide; and (b) a heterologous amino acid or heterologous polypeptide inserted internally within the Cas9 polypeptide, wherein the heterologous amino acid or heterologous polypeptide is inserted at a position that is immediately adjacent and C-terminal to amino acid 533 of the Cas9 protein set forth in SEQ ID NO:5, or a corresponding amino acid residue in another Cas9 polypeptide; and wherein the Cas9 fusion polypeptide retains cleavage and/or binding activity relative to the activity of the Cas9 polypeptide without the inserted heterologous amino acid or heterologous polypeptide. In some cases, a Cas9 fusion polypeptide of the present disclosure comprises: (a) a Cas9 polypeptide; and (b) a heterologous amino acid or heterologous polypeptide inserted internally within the Cas9 polypeptide, wherein the heterologous amino acid or heterologous polypeptide is inserted at a position that is immediately adjacent and N-terminal to amino acid 533 of the Cas9 protein set forth in SEQ ID NO:5, or a corresponding amino acid residue in another Cas9 polypeptide; and wherein the Cas9 fusion polypeptide retains cleavage and/or binding activity relative to the activity of the Cas9 polypeptide without the inserted heterologous amino acid or heterologous polypeptide. In some cases, the heterologous amino acid or heterologous polypeptide is inserted between residues 532 and 533, or between residues 533 and 534, of the Cas9 protein set forth in SEQ ID NO:5, or a corresponding amino acid residue in another Cas9 polypeptide.

[0091] In some cases, a Cas9 fusion polypeptide of the present disclosure comprises: (a) a Cas9 polypeptide; and (b) a heterologous amino acid or heterologous polypeptide inserted internally within the Cas9 polypeptide, wherein the heterologous amino acid or heterologous polypeptide is inserted at a position that is immediately adjacent and C-terminal to amino acid 536 of the Cas9 protein set forth in SEQ ID NO:5, or a corresponding amino acid residue in another Cas9 polypeptide; and wherein the Cas9 fusion polypeptide retains cleavage and/or binding activity relative to the activity of the Cas9 polypeptide without the inserted heterologous amino acid or heterologous polypeptide. In some cases, a Cas9 fusion polypeptide of the present disclosure comprises: (a) a Cas9 polypeptide; and (b) a heterologous amino acid or heterologous polypeptide inserted internally within the Cas9 polypeptide, wherein the heterologous amino acid or heterologous polypeptide is inserted at a position that is immediately adjacent and N-terminal to amino acid 536 of the Cas9 protein set forth in SEQ ID NO:5, or a corresponding amino acid residue in another Cas9 polypeptide; and wherein the Cas9 fusion polypeptide retains cleavage and/or binding activity relative to the activity of the Cas9 polypeptide without the inserted heterologous amino acid or heterologous polypeptide. In some cases, the heterologous amino acid or heterologous polypeptide is inserted between residues 535 and 536, or between residues 536 and 537, of the Cas9 protein set forth in SEQ ID NO:5, or a corresponding amino acid residue in another Cas9 polypeptide.

[0092] In some cases, a Cas9 fusion polypeptide of the present disclosure comprises: (a) a Cas9 polypeptide; and (b) a heterologous amino acid or heterologous polypeptide inserted internally within the Cas9 polypeptide, wherein the heterologous amino acid or heterologous polypeptide is inserted at a position that is immediately adjacent and C-terminal to amino acid 576 of the Cas9 protein set forth in SEQ ID NO:5, or a corresponding amino acid residue in another Cas9 polypeptide; and wherein the Cas9 fusion polypeptide retains cleavage and/or binding activity relative to the activity of the Cas9 polypeptide without the inserted heterologous amino acid or heterologous polypeptide. In some cases, a Cas9 fusion polypeptide of the present disclosure comprises: (a) a Cas9 polypeptide; and (b) a heterologous amino acid or heterologous polypeptide inserted internally within the Cas9 polypeptide, wherein the heterologous amino acid or heterologous polypeptide is inserted at a position that is immediately adjacent and N-terminal to amino acid 576 of the Cas9 protein set forth in SEQ ID NO:5, or a corresponding amino acid residue in another Cas9 polypeptide; and wherein the Cas9 fusion polypeptide retains cleavage and/or binding activity relative to the activity of the Cas9 polypeptide without the inserted heterologous amino acid or heterologous polypeptide. In some cases, the heterologous amino acid or heterologous polypeptide is inserted between residues 575 and 576, or between residues 576 and 577, of the Cas9 protein set forth in SEQ ID NO:5, or a corresponding amino acid residue in another Cas9 polypeptide.

[0093] In some cases, a Cas9 fusion polypeptide of the present disclosure comprises: (a) a Cas9 polypeptide; and (b) a heterologous amino acid or heterologous polypeptide inserted internally within the Cas9 polypeptide, wherein the heterologous amino acid or heterologous polypeptide is inserted at a position that is immediately adjacent and C-terminal to amino acid 577 of the Cas9 protein set forth in SEQ ID NO:5, or a corresponding amino acid residue in another Cas9 polypeptide; and wherein the Cas9 fusion polypeptide retains cleavage and/or binding activity relative to the activity of the Cas9 polypeptide without the inserted heterologous amino acid or heterologous polypeptide. In some cases, a Cas9 fusion polypeptide of the present disclosure comprises: (a) a Cas9 polypeptide; and (b) a heterologous amino acid or heterologous polypeptide inserted internally within the Cas9 polypeptide, wherein the heterologous amino acid or heterologous polypeptide is inserted at a position that is immediately adjacent and N-terminal to amino acid 577 of the Cas9 protein set forth in SEQ ID NO:5, or a corresponding amino acid residue in another Cas9 polypeptide; and wherein the Cas9 fusion polypeptide retains cleavage and/or binding activity relative to the activity of the Cas9 polypeptide without the inserted heterologous amino acid or heterologous polypeptide. In some cases, the heterologous amino acid or heterologous polypeptide is inserted between residues 577 and 578, or between residues 578 and 579, of the Cas9 protein set forth in SEQ ID NO:5, or a corresponding amino acid residue in another Cas9 polypeptide.

[0094] In some cases, a Cas9 fusion polypeptide of the present disclosure comprises: (a) a Cas9 polypeptide; and (b) a heterologous amino acid or heterologous polypeptide inserted internally within the Cas9 polypeptide, wherein the heterologous amino acid or heterologous polypeptide is inserted at a position that is immediately adjacent and C-terminal to amino acid 579 of the Cas9 protein set forth in SEQ ID NO:5, or a corresponding amino acid residue in another Cas9 polypeptide; and wherein the Cas9 fusion polypeptide retains cleavage and/or binding activity relative to the activity of the Cas9 polypeptide without the inserted heterologous amino acid or heterologous polypeptide. In some cases, a Cas9 fusion polypeptide of the present disclosure comprises: (a) a Cas9 polypeptide; and (b) a heterologous amino acid or heterologous polypeptide inserted internally within the Cas9 polypeptide, wherein the heterologous amino acid or heterologous polypeptide is inserted at a position that is immediately adjacent and N-terminal to amino acid 579 of the Cas9 protein set forth in SEQ ID NO:5, or a corresponding amino acid residue in another Cas9 polypeptide; and wherein the Cas9 fusion polypeptide retains cleavage and/or binding activity relative to the activity of the Cas9 polypeptide without the inserted heterologous amino acid or heterologous polypeptide. In some cases, the heterologous amino acid or heterologous polypeptide is inserted between residues 579 and 580, or between residues 580 and 581, of the Cas9 protein set forth in SEQ ID NO:5, or a corresponding amino acid residue in another Cas9 polypeptide.

[0095] In some cases, a Cas9 fusion polypeptide of the present disclosure comprises: (a) a Cas9 polypeptide; and (b) a heterologous amino acid or heterologous polypeptide inserted internally within the Cas9 polypeptide, wherein the heterologous amino acid or heterologous polypeptide is inserted at a position that is immediately adjacent and C-terminal to amino acid 588 of the Cas9 protein set forth in SEQ ID NO:5, or a corresponding amino acid residue in another Cas9 polypeptide; and wherein the Cas9 fusion polypeptide retains cleavage and/or binding activity relative to the activity of the Cas9 polypeptide without the inserted heterologous amino acid or heterologous polypeptide. In some cases, a Cas9 fusion polypeptide of the present disclosure comprises: (a) a Cas9 polypeptide; and (b) a heterologous amino acid or heterologous polypeptide inserted internally within the Cas9 polypeptide, wherein the heterologous amino acid or heterologous polypeptide is inserted at a position that is immediately adjacent and N-terminal to amino acid 588 of the Cas9 protein set forth in SEQ ID NO:5, or a corresponding amino acid residue in another Cas9 polypeptide; and wherein the Cas9 fusion polypeptide retains cleavage and/or binding activity relative to the activity of the Cas9 polypeptide without the inserted heterologous amino acid or heterologous polypeptide. In some cases, the heterologous amino acid or heterologous polypeptide is inserted between residues 587 and 588, or between residues 588 and 589, of the Cas9 protein set forth in SEQ ID NO:5, or a corresponding amino acid residue in another Cas9 polypeptide.

[0096] In some cases, a Cas9 fusion polypeptide of the present disclosure comprises: (a) a Cas9 polypeptide; and (b) a heterologous amino acid or heterologous polypeptide inserted internally within the Cas9 polypeptide, wherein the heterologous amino acid or heterologous polypeptide is inserted at a position that is immediately adjacent and C-terminal to amino acid 639 of the Cas9 protein set forth in SEQ ID NO:5, or a corresponding amino acid residue in another Cas9 polypeptide; and wherein the Cas9 fusion polypeptide retains cleavage and/or binding activity relative to the activity of the Cas9 polypeptide without the inserted heterologous amino acid or heterologous polypeptide. In some cases, a Cas9 fusion polypeptide of the present disclosure comprises: (a) a Cas9 polypeptide; and (b) a heterologous amino acid or heterologous polypeptide inserted internally within the Cas9 polypeptide, wherein the heterologous amino acid or heterologous polypeptide is inserted at a position that is immediately adjacent and N-terminal to amino acid 639 of the Cas9 protein set forth in SEQ ID NO:5, or a corresponding amino acid residue in another Cas9 polypeptide; and wherein the Cas9 fusion polypeptide retains cleavage and/or binding activity relative to the activity of the Cas9 polypeptide without the inserted heterologous amino acid or heterologous polypeptide. In some cases, the heterologous amino acid or heterologous polypeptide is inserted between residues 638 and 639, or between residues 639 and 670, of the Cas9 protein set forth in SEQ ID NO:5, or a corresponding amino acid residue in another Cas9 polypeptide.

[0097] In some cases, a Cas9 fusion polypeptide of the present disclosure comprises: (a) a Cas9 polypeptide; and (b) a heterologous amino acid or heterologous polypeptide inserted internally within the Cas9 polypeptide, wherein the heterologous amino acid or heterologous polypeptide is inserted at a position that is immediately adjacent and C-terminal to amino acid 641 of the Cas9 protein set forth in SEQ ID NO:5, or a corresponding amino acid residue in another Cas9 polypeptide; and wherein the Cas9 fusion polypeptide retains cleavage and/or binding activity relative to the activity of the Cas9 polypeptide without the inserted heterologous amino acid or heterologous polypeptide. In some cases, a Cas9 fusion polypeptide of the present disclosure comprises: (a) a Cas9 polypeptide; and (b) a heterologous amino acid or heterologous polypeptide inserted internally within the Cas9 polypeptide, wherein the heterologous amino acid or heterologous polypeptide is inserted at a position that is immediately adjacent and N-terminal to amino acid 641 of the Cas9 protein set forth in SEQ ID NO:5, or a corresponding amino acid residue in another Cas9 polypeptide; and wherein the Cas9 fusion polypeptide retains cleavage and/or binding activity relative to the activity of the Cas9 polypeptide without the inserted heterologous amino acid or heterologous polypeptide. In some cases, the heterologous amino acid or heterologous polypeptide is inserted between residues 640 and 641, or between residues 641 and 642, of the Cas9 protein set forth in SEQ ID NO:5, or a corresponding amino acid residue in another Cas9 polypeptide.

[0098] In some cases, a Cas9 fusion polypeptide of the present disclosure comprises: (a) a Cas9 polypeptide; and (b) a heterologous amino acid or heterologous polypeptide inserted internally within the Cas9 polypeptide, wherein the heterologous amino acid or heterologous polypeptide is inserted at a position that is immediately adjacent and C-terminal to amino acid 645 of the Cas9 protein set forth in SEQ ID NO:5, or a corresponding amino acid residue in another Cas9 polypeptide; and wherein the Cas9 fusion polypeptide retains cleavage and/or binding activity relative to the activity of the Cas9 polypeptide without the inserted heterologous amino acid or heterologous polypeptide. In some cases, a Cas9 fusion polypeptide of the present disclosure comprises: (a) a Cas9 polypeptide; and (b) a heterologous amino acid or heterologous polypeptide inserted internally within the Cas9 polypeptide, wherein the heterologous amino acid or heterologous polypeptide is inserted at a position that is immediately adjacent and N-terminal to amino acid 645 of the Cas9 protein set forth in SEQ ID NO:5, or a corresponding amino acid residue in another Cas9 polypeptide; and wherein the Cas9 fusion polypeptide retains cleavage and/or binding activity relative to the activity of the Cas9 polypeptide without the inserted heterologous amino acid or heterologous polypeptide. In some cases, the heterologous amino acid or heterologous polypeptide is inserted between residues 644 and 645, or between residues 645 and 646, of the Cas9 protein set forth in SEQ ID NO:5, or a corresponding amino acid residue in another Cas9 polypeptide.

[0099] In some cases, a Cas9 fusion polypeptide of the present disclosure comprises: (a) a Cas9 polypeptide; and (b) a heterologous amino acid or heterologous polypeptide inserted internally within the Cas9 polypeptide, wherein the heterologous amino acid or heterologous polypeptide is inserted at a position that is immediately adjacent and C-terminal to amino acid 647 of the Cas9 protein set forth in SEQ ID NO:5, or a corresponding amino acid residue in another Cas9 polypeptide; and wherein the Cas9 fusion polypeptide retains cleavage and/or binding activity relative to the activity of the Cas9 polypeptide without the inserted heterologous amino acid or heterologous polypeptide. In some cases, a Cas9 fusion polypeptide of the present disclosure comprises: (a) a Cas9 polypeptide; and (b) a heterologous amino acid or heterologous polypeptide inserted internally within the Cas9 polypeptide, wherein the heterologous amino acid or heterologous polypeptide is inserted at a position that is immediately adjacent and N-terminal to amino acid 647 of the Cas9 protein set forth in SEQ ID NO:5, or a corresponding amino acid residue in another Cas9 polypeptide; and wherein the Cas9 fusion polypeptide retains cleavage and/or binding activity relative to the activity of the Cas9 polypeptide without the inserted heterologous amino acid or heterologous polypeptide. In some cases, the heterologous amino acid or heterologous polypeptide is inserted between residues 646 and 647, or between residues 647 and 648, of the Cas9 protein set forth in SEQ ID NO:5, or a corresponding amino acid residue in another Cas9 polypeptide.

[0100] In some cases, a Cas9 fusion polypeptide of the present disclosure comprises: (a) a Cas9 polypeptide; and (b) a heterologous amino acid or heterologous polypeptide inserted internally within the Cas9 polypeptide, wherein the heterologous amino acid or heterologous polypeptide is inserted at a position that is immediately adjacent and C-terminal to amino acid 687 of the Cas9 protein set forth in SEQ ID NO:5, or a corresponding amino acid residue in another Cas9 polypeptide; and wherein the Cas9 fusion polypeptide retains cleavage and/or binding activity relative to the activity of the Cas9 polypeptide without the inserted heterologous amino acid or heterologous polypeptide. In some cases, a Cas9 fusion polypeptide of the present disclosure comprises: (a) a Cas9 polypeptide; and (b) a heterologous amino acid or heterologous polypeptide inserted internally within the Cas9 polypeptide, wherein the heterologous amino acid or heterologous polypeptide is inserted at a position that is immediately adjacent and N-terminal to amino acid 687 of the Cas9 protein set forth in SEQ ID NO:5, or a corresponding amino acid residue in another Cas9 polypeptide; and wherein the Cas9 fusion polypeptide retains cleavage and/or binding activity relative to the activity of the Cas9 polypeptide without the inserted heterologous amino acid or heterologous polypeptide. In some cases, the heterologous amino acid or heterologous polypeptide is inserted between residues 686 and 687, or between residues 687 and 688, of the Cas9 protein set forth in SEQ ID NO:5, or a corresponding amino acid residue in another Cas9 polypeptide.

[0101] In some cases, a Cas9 fusion polypeptide of the present disclosure comprises: (a) a Cas9 polypeptide; and (b) a heterologous amino acid or heterologous polypeptide inserted internally within the Cas9 polypeptide, wherein the heterologous amino acid or heterologous polypeptide is inserted at a position that is immediately adjacent and C-terminal to amino acid 689 of the Cas9 protein set forth in SEQ ID NO:5, or a corresponding amino acid residue in another Cas9 polypeptide; and wherein the Cas9 fusion polypeptide retains cleavage and/or binding activity relative to the activity of the Cas9 polypeptide without the inserted heterologous amino acid or heterologous polypeptide. In some cases, a Cas9 fusion polypeptide of the present disclosure comprises: (a) a Cas9 polypeptide; and (b) a heterologous amino acid or heterologous polypeptide inserted internally within the Cas9 polypeptide, wherein the heterologous amino acid or heterologous polypeptide is inserted at a position that is immediately adjacent and N-terminal to amino acid 689 of the Cas9 protein set forth in SEQ ID NO:5, or a corresponding amino acid residue in another Cas9 polypeptide; and wherein the Cas9 fusion polypeptide retains cleavage and/or binding activity relative to the activity of the Cas9 polypeptide without the inserted heterologous amino acid or heterologous polypeptide. In some cases, the heterologous amino acid or heterologous polypeptide is inserted between residues 688 and 689, or between residues 689 and 690, of the Cas9 protein set forth in SEQ ID NO:5, or a corresponding amino acid residue in another Cas9 polypeptide.

[0102] In some cases, a Cas9 fusion polypeptide of the present disclosure comprises: (a) a Cas9 polypeptide; and (b) a heterologous amino acid or heterologous polypeptide inserted internally within the Cas9 polypeptide, wherein the heterologous amino acid or heterologous polypeptide is inserted at a position that is immediately adjacent and C-terminal to amino acid 690 of the Cas9 protein set forth in SEQ ID NO:5, or a corresponding amino acid residue in another Cas9 polypeptide; and wherein the Cas9 fusion polypeptide retains cleavage and/or binding activity relative to the activity of the Cas9 polypeptide without the inserted heterologous amino acid or heterologous polypeptide. In some cases, a Cas9 fusion polypeptide of the present disclosure comprises: (a) a Cas9 polypeptide; and (b) a heterologous amino acid or heterologous polypeptide inserted internally within the Cas9 polypeptide, wherein the heterologous amino acid or heterologous polypeptide is inserted at a position that is immediately adjacent and N-terminal to amino acid 690 of the Cas9 protein set forth in SEQ ID NO:5, or a corresponding amino acid residue in another Cas9 polypeptide; and wherein the Cas9 fusion polypeptide retains cleavage and/or binding activity relative to the activity of the Cas9 polypeptide without the inserted heterologous amino acid or heterologous polypeptide. In some cases, the heterologous amino acid or heterologous polypeptide is inserted between residues 689 and 690, or between residues 690 and 691, of the Cas9 protein set forth in SEQ ID NO:5, or a corresponding amino acid residue in another Cas9 polypeptide.

[0103] In some cases, a Cas9 fusion polypeptide of the present disclosure comprises: (a) a Cas9 polypeptide; and (b) a heterologous amino acid or heterologous polypeptide inserted internally within the Cas9 polypeptide, wherein the heterologous amino acid or heterologous polypeptide is inserted at a position that is immediately adjacent and C-terminal to amino acid 692 of the Cas9 protein set forth in SEQ ID NO:5, or a corresponding amino acid residue in another Cas9 polypeptide; and wherein the Cas9 fusion polypeptide retains cleavage and/or binding activity relative to the activity of the Cas9 polypeptide without the inserted heterologous amino acid or heterologous polypeptide. In some cases, a Cas9 fusion polypeptide of the present disclosure comprises: (a) a Cas9 polypeptide; and (b) a heterologous amino acid or heterologous polypeptide inserted internally within the Cas9 polypeptide, wherein the heterologous amino acid or heterologous polypeptide is inserted at a position that is immediately adjacent and N-terminal to amino acid 692 of the Cas9 protein set forth in SEQ ID NO:5, or a corresponding amino acid residue in another Cas9 polypeptide; and wherein the Cas9 fusion polypeptide retains cleavage and/or binding activity relative to the activity of the Cas9 polypeptide without the inserted heterologous amino acid or heterologous polypeptide. In some cases, the heterologous amino acid or heterologous polypeptide is inserted between residues 691 and 692, or between residues 692 and 693, of the Cas9 protein set forth in SEQ ID NO:5, or a corresponding amino acid residue in another Cas9 polypeptide.

[0104] In some cases, a Cas9 fusion polypeptide of the present disclosure comprises: (a) a Cas9 polypeptide; and (b) a heterologous amino acid or heterologous polypeptide inserted internally within the Cas9 polypeptide, wherein the heterologous amino acid or heterologous polypeptide is inserted at a position that is immediately adjacent and C-terminal to amino acid 713 of the Cas9 protein set forth in SEQ ID NO:5, or a corresponding amino acid residue in another Cas9 polypeptide; and wherein the Cas9 fusion polypeptide retains cleavage and/or binding activity relative to the activity of the Cas9 polypeptide without the inserted heterologous amino acid or heterologous polypeptide. In some cases, a Cas9 fusion polypeptide of the present disclosure comprises: (a) a Cas9 polypeptide; and (b) a heterologous amino acid or heterologous polypeptide inserted internally within the Cas9 polypeptide, wherein the heterologous amino acid or heterologous polypeptide is inserted at a position that is immediately adjacent and N-terminal to amino acid 713 of the Cas9 protein set forth in SEQ ID NO:5, or a corresponding amino acid residue in another Cas9 polypeptide; and wherein the Cas9 fusion polypeptide retains cleavage and/or binding activity relative to the activity of the Cas9 polypeptide without the inserted heterologous amino acid or heterologous polypeptide. In some cases, the heterologous amino acid or heterologous polypeptide is inserted between residues 712 and 713, or between residues 713 and 714, of the Cas9 protein set forth in SEQ ID NO:5, or a corresponding amino acid residue in another Cas9 polypeptide.

[0105] In some cases, a Cas9 fusion polypeptide of the present disclosure comprises: (a) a Cas9 polypeptide; and (b) a heterologous amino acid or heterologous polypeptide inserted internally within the Cas9 polypeptide, wherein the heterologous amino acid or heterologous polypeptide is inserted at a position that is immediately adjacent and C-terminal to amino acid 715 of the Cas9 protein set forth in SEQ ID NO:5, or a corresponding amino acid residue in another Cas9 polypeptide; and wherein the Cas9 fusion polypeptide retains cleavage and/or binding activity relative to the activity of the Cas9 polypeptide without the inserted heterologous amino acid or heterologous polypeptide. In some cases, a Cas9 fusion polypeptide of the present disclosure comprises: (a) a Cas9 polypeptide; and (b) a heterologous amino acid or heterologous polypeptide inserted internally within the Cas9 polypeptide, wherein the heterologous amino acid or heterologous polypeptide is inserted at a position that is immediately adjacent and N-terminal to amino acid 715 of the Cas9 protein set forth in SEQ ID NO:5, or a corresponding amino acid residue in another Cas9 polypeptide; and wherein the Cas9 fusion polypeptide retains cleavage and/or binding activity relative to the activity of the Cas9 polypeptide without the inserted heterologous amino acid or heterologous polypeptide. In some cases, the heterologous amino acid or heterologous polypeptide is inserted between residues 714 and 715, or between residues 715 and 716, of the Cas9 protein set forth in SEQ ID NO:5, or a corresponding amino acid residue in another Cas9 polypeptide.

[0106] In some cases, a Cas9 fusion polypeptide of the present disclosure comprises: (a) a Cas9 polypeptide; and (b) a heterologous amino acid or heterologous polypeptide inserted internally within the Cas9 polypeptide, wherein the heterologous amino acid or heterologous polypeptide is inserted at a position that is immediately adjacent and C-terminal to amino acid 717 of the Cas9 protein set forth in SEQ ID NO:5, or a corresponding amino acid residue in another Cas9 polypeptide; and wherein the Cas9 fusion polypeptide retains cleavage and/or binding activity relative to the activity of the Cas9 polypeptide without the inserted heterologous amino acid or heterologous polypeptide. In some cases, a Cas9 fusion polypeptide of the present disclosure comprises: (a) a Cas9 polypeptide; and (b) a heterologous amino acid or heterologous polypeptide inserted internally within the Cas9 polypeptide, wherein the heterologous amino acid or heterologous polypeptide is inserted at a position that is immediately adjacent and N-terminal to amino acid 717 of the Cas9 protein set forth in SEQ ID NO:5, or a corresponding amino acid residue in another Cas9 polypeptide; and wherein the Cas9 fusion polypeptide retains cleavage and/or binding activity relative to the activity of the Cas9 polypeptide without the inserted heterologous amino acid or heterologous polypeptide. In some cases, the heterologous amino acid or heterologous polypeptide is inserted between residues 716 and 717, or between residues 717 and 718, of the Cas9 protein set forth in SEQ ID NO:5, or a corresponding amino acid residue in another Cas9 polypeptide.

[0107] In some cases, a Cas9 fusion polypeptide of the present disclosure comprises: (a) a Cas9 polypeptide; and (b) a heterologous amino acid or heterologous polypeptide inserted internally within the Cas9 polypeptide, wherein the heterologous amino acid or heterologous polypeptide is inserted at a position that is immediately adjacent and C-terminal to amino acid 719 of the Cas9 protein set forth in SEQ ID NO:5, or a corresponding amino acid residue in another Cas9 polypeptide; and wherein the Cas9 fusion polypeptide retains cleavage and/or binding activity relative to the activity of the Cas9 polypeptide without the inserted heterologous amino acid or heterologous polypeptide. In some cases, a Cas9 fusion polypeptide of the present disclosure comprises: (a) a Cas9 polypeptide; and (b) a heterologous amino acid or heterologous polypeptide inserted internally within the Cas9 polypeptide, wherein the heterologous amino acid or heterologous polypeptide is inserted at a position that is immediately adjacent and N-terminal to amino acid 719 of the Cas9 protein set forth in SEQ ID NO:5, or a corresponding amino acid residue in another Cas9 polypeptide; and wherein the Cas9 fusion polypeptide retains cleavage and/or binding activity relative to the activity of the Cas9 polypeptide without the inserted heterologous amino acid or heterologous polypeptide. In some cases, the heterologous amino acid or heterologous polypeptide is inserted between residues 718 and 719, or between residues 719 and 720, of the Cas9 protein set forth in SEQ ID NO:5, or a corresponding amino acid residue in another Cas9 polypeptide.

[0108] In some cases, a Cas9 fusion polypeptide of the present disclosure comprises: (a) a Cas9 polypeptide; and (b) a heterologous amino acid or heterologous polypeptide inserted internally within the Cas9 polypeptide, wherein the heterologous amino acid or heterologous polypeptide is inserted at a position that is immediately adjacent and C-terminal to amino acid 721 of the Cas9 protein set forth in SEQ ID NO:5, or a corresponding amino acid residue in another Cas9 polypeptide; and wherein the Cas9 fusion polypeptide retains cleavage and/or binding activity relative to the activity of the Cas9 polypeptide without the inserted heterologous amino acid or heterologous polypeptide. In some cases, a Cas9 fusion polypeptide of the present disclosure comprises: (a) a Cas9 polypeptide; and (b) a heterologous amino acid or heterologous polypeptide inserted internally within the Cas9 polypeptide, wherein the heterologous amino acid or heterologous polypeptide is inserted at a position that is immediately adjacent and N-terminal to amino acid 721 of the Cas9 protein set forth in SEQ ID NO:5, or a corresponding amino acid residue in another Cas9 polypeptide; and wherein the Cas9 fusion polypeptide retains cleavage and/or binding activity relative to the activity of the Cas9 polypeptide without the inserted heterologous amino acid or heterologous polypeptide. In some cases, the heterologous amino acid or heterologous polypeptide is inserted between residues 720 and 721, or between residues 721 and 722, of the Cas9 protein set forth in SEQ ID NO:5, or a corresponding amino acid residue in another Cas9 polypeptide.

[0109] In some cases, a Cas9 fusion polypeptide of the present disclosure comprises: (a) a Cas9 polypeptide; and (b) a heterologous amino acid or heterologous polypeptide inserted internally within the Cas9 polypeptide, wherein the heterologous amino acid or heterologous polypeptide is inserted at a position that is immediately adjacent and C-terminal to amino acid 724 of the Cas9 protein set forth in SEQ ID NO:5, or a corresponding amino acid residue in another Cas9 polypeptide; and wherein the Cas9 fusion polypeptide retains cleavage and/or binding activity relative to the activity of the Cas9 polypeptide without the inserted heterologous amino acid or heterologous polypeptide. In some cases, a Cas9 fusion polypeptide of the present disclosure comprises: (a) a Cas9 polypeptide; and (b) a heterologous amino acid or heterologous polypeptide inserted internally within the Cas9 polypeptide, wherein the heterologous amino acid or heterologous polypeptide is inserted at a position that is immediately adjacent and N-terminal to amino acid 724 of the Cas9 protein set forth in SEQ ID NO:5, or a corresponding amino acid residue in another Cas9 polypeptide; and wherein the Cas9 fusion polypeptide retains cleavage and/or binding activity relative to the activity of the Cas9 polypeptide without the inserted heterologous amino acid or heterologous polypeptide. In some cases, the heterologous amino acid or heterologous polypeptide is inserted between residues 723 and 724, or between residues 724 and 725, of the Cas9 protein set forth in SEQ ID NO:5, or a corresponding amino acid residue in another Cas9 polypeptide.

[0110] In some cases, a Cas9 fusion polypeptide of the present disclosure comprises: (a) a Cas9 polypeptide; and (b) a heterologous amino acid or heterologous polypeptide inserted internally within the Cas9 polypeptide, wherein the heterologous amino acid or heterologous polypeptide is inserted at a position that is immediately adjacent and C-terminal to amino acid 798 of the Cas9 protein set forth in SEQ ID NO:5, or a corresponding amino acid residue in another Cas9 polypeptide; and wherein the Cas9 fusion polypeptide retains cleavage and/or binding activity relative to the activity of the Cas9 polypeptide without the inserted heterologous amino acid or heterologous polypeptide. In some cases, a Cas9 fusion polypeptide of the present disclosure comprises: (a) a Cas9 polypeptide; and (b) a heterologous amino acid or heterologous polypeptide inserted internally within the Cas9 polypeptide, wherein the heterologous amino acid or heterologous polypeptide is inserted at a position that is immediately adjacent and N-terminal to amino acid 798 of the Cas9 protein set forth in SEQ ID NO:5, or a corresponding amino acid residue in another Cas9 polypeptide; and wherein the Cas9 fusion polypeptide retains cleavage and/or binding activity relative to the activity of the Cas9 polypeptide without the inserted heterologous amino acid or heterologous polypeptide. In some cases, the heterologous amino acid or heterologous polypeptide is inserted between residues 797 and 798, or between residues 798 and 799, of the Cas9 protein set forth in SEQ ID NO:5, or a corresponding amino acid residue in another Cas9 polypeptide.

[0111] In some cases, a Cas9 fusion polypeptide of the present disclosure comprises: (a) a Cas9 polypeptide; and (b) a heterologous amino acid or heterologous polypeptide inserted internally within the Cas9 polypeptide, wherein the heterologous amino acid or heterologous polypeptide is inserted at a position that is immediately adjacent and C-terminal to amino acid 801 of the Cas9 protein set forth in SEQ ID NO:5, or a corresponding amino acid residue in another Cas9 polypeptide; and wherein the Cas9 fusion polypeptide retains cleavage and/or binding activity relative to the activity of the Cas9 polypeptide without the inserted heterologous amino acid or heterologous polypeptide. In some cases, a Cas9 fusion polypeptide of the present disclosure comprises: (a) a Cas9 polypeptide; and (b) a heterologous amino acid or heterologous polypeptide inserted internally within the Cas9 polypeptide, wherein the heterologous amino acid or heterologous polypeptide is inserted at a position that is immediately adjacent and N-terminal to amino acid 801 of the Cas9 protein set forth in SEQ ID NO:5, or a corresponding amino acid residue in another Cas9 polypeptide; and wherein the Cas9 fusion polypeptide retains cleavage and/or binding activity relative to the activity of the Cas9 polypeptide without the inserted heterologous amino acid or heterologous polypeptide. In some cases, the heterologous amino acid or heterologous polypeptide is inserted between residues 800 and 801, or between residues 801 and 802, of the Cas9 protein set forth in SEQ ID NO:5, or a corresponding amino acid residue in another Cas9 polypeptide.

[0112] In some cases, a Cas9 fusion polypeptide of the present disclosure comprises: (a) a Cas9 polypeptide; and (b) a heterologous amino acid or heterologous polypeptide inserted internally within the Cas9 polypeptide, wherein the heterologous amino acid or heterologous polypeptide is inserted at a position that is immediately adjacent and C-terminal to amino acid 802 of the Cas9 protein set forth in SEQ ID NO:5, or a corresponding amino acid residue in another Cas9 polypeptide; and wherein the Cas9 fusion polypeptide retains cleavage and/or binding activity relative to the activity of the Cas9 polypeptide without the inserted heterologous amino acid or heterologous polypeptide. In some cases, a Cas9 fusion polypeptide of the present disclosure comprises: (a) a Cas9 polypeptide; and (b) a heterologous amino acid or heterologous polypeptide inserted internally within the Cas9 polypeptide, wherein the heterologous amino acid or heterologous polypeptide is inserted at a position that is immediately adjacent and N-terminal to amino acid 802 of the Cas9 protein set forth in SEQ ID NO:5, or a corresponding amino acid residue in another Cas9 polypeptide; and wherein the Cas9 fusion polypeptide retains cleavage and/or binding activity relative to the activity of the Cas9 polypeptide without the inserted heterologous amino acid or heterologous polypeptide. In some cases, the heterologous amino acid or heterologous polypeptide is inserted between residues 801 and 802, or between residues 802 and 803, of the Cas9 protein set forth in SEQ ID NO:5, or a corresponding amino acid residue in another Cas9 polypeptide.

[0113] In some cases, a Cas9 fusion polypeptide of the present disclosure comprises: (a) a Cas9 polypeptide; and (b) a heterologous amino acid or heterologous polypeptide inserted internally within the Cas9 polypeptide, wherein the heterologous amino acid or heterologous polypeptide is inserted at a position that is immediately adjacent and C-terminal to amino acid 804 of the Cas9 protein set forth in SEQ ID NO:5, or a corresponding amino acid residue in another Cas9 polypeptide; and wherein the Cas9 fusion polypeptide retains cleavage and/or binding activity relative to the activity of the Cas9 polypeptide without the inserted heterologous amino acid or heterologous polypeptide. In some cases, a Cas9 fusion polypeptide of the present disclosure comprises: (a) a Cas9 polypeptide; and (b) a heterologous amino acid or heterologous polypeptide inserted internally within the Cas9 polypeptide, wherein the heterologous amino acid or heterologous polypeptide is inserted at a position that is immediately adjacent and N-terminal to amino acid 804 of the Cas9 protein set forth in SEQ ID NO:5, or a corresponding amino acid residue in another Cas9 polypeptide; and wherein the Cas9 fusion polypeptide retains cleavage and/or binding activity relative to the activity of the Cas9 polypeptide without the inserted heterologous amino acid or heterologous polypeptide. In some cases, the heterologous amino acid or heterologous polypeptide is inserted between residues 803 and 804, or between residues 804 and 805, of the Cas9 protein set forth in SEQ ID NO:5, or a corresponding amino acid residue in another Cas9 polypeptide.

[0114] In some cases, a Cas9 fusion polypeptide of the present disclosure comprises: (a) a Cas9 polypeptide; and (b) a heterologous amino acid or heterologous polypeptide inserted internally within the Cas9 polypeptide, wherein the heterologous amino acid or heterologous polypeptide is inserted at a position that is immediately adjacent and C-terminal to amino acid 834 of the Cas9 protein set forth in SEQ ID NO:5, or a corresponding amino acid residue in another Cas9 polypeptide; and wherein the Cas9 fusion polypeptide retains cleavage and/or binding activity relative to the activity of the Cas9 polypeptide without the inserted heterologous amino acid or heterologous polypeptide. In some cases, a Cas9 fusion polypeptide of the present disclosure comprises: (a) a Cas9 polypeptide; and (b) a heterologous amino acid or heterologous polypeptide inserted internally within the Cas9 polypeptide, wherein the heterologous amino acid or heterologous polypeptide is inserted at a position that is immediately adjacent and N-terminal to amino acid 834 of the Cas9 protein set forth in SEQ ID NO:5, or a corresponding amino acid residue in another Cas9 polypeptide; and wherein the Cas9 fusion polypeptide retains cleavage and/or binding activity relative to the activity of the Cas9 polypeptide without the inserted heterologous amino acid or heterologous polypeptide. In some cases, the heterologous amino acid or heterologous polypeptide is inserted between residues 833 and 834, or between residues 834 and 835, of the Cas9 protein set forth in SEQ ID NO:5, or a corresponding amino acid residue in another Cas9 polypeptide.

[0115] In some cases, a Cas9 fusion polypeptide of the present disclosure comprises: (a) a Cas9 polypeptide; and (b) a heterologous amino acid or heterologous polypeptide inserted internally within the Cas9 polypeptide, wherein the heterologous amino acid or heterologous polypeptide is inserted at a position that is immediately adjacent and C-terminal to amino acid 868 of the Cas9 protein set forth in SEQ ID NO:5, or a corresponding amino acid residue in another Cas9 polypeptide; and wherein the Cas9 fusion polypeptide retains cleavage and/or binding activity relative to the activity of the Cas9 polypeptide without the inserted heterologous amino acid or heterologous polypeptide. In some cases, a Cas9 fusion polypeptide of the present disclosure comprises: (a) a Cas9 polypeptide; and (b) a heterologous amino acid or heterologous polypeptide inserted internally within the Cas9 polypeptide, wherein the heterologous amino acid or heterologous polypeptide is inserted at a position that is immediately adjacent and N-terminal to amino acid 868 of the Cas9 protein set forth in SEQ ID NO:5, or a corresponding amino acid residue in another Cas9 polypeptide; and wherein the Cas9 fusion polypeptide retains cleavage and/or binding activity relative to the activity of the Cas9 polypeptide without the inserted heterologous amino acid or heterologous polypeptide. In some cases, the heterologous amino acid or heterologous polypeptide is inserted between residues 867 and 868, or between residues 868 and 869, of the Cas9 protein set forth in SEQ ID NO:5, or a corresponding amino acid residue in another Cas9 polypeptide.

[0116] In some cases, a Cas9 fusion polypeptide of the present disclosure comprises: (a) a Cas9 polypeptide; and (b) a heterologous amino acid or heterologous polypeptide inserted internally within the Cas9 polypeptide, wherein the heterologous amino acid or heterologous polypeptide is inserted at a position that is immediately adjacent and C-terminal to amino acid 890 of the Cas9 protein set forth in SEQ ID NO:5, or a corresponding amino acid residue in another Cas9 polypeptide; and wherein the Cas9 fusion polypeptide retains cleavage and/or binding activity relative to the activity of the Cas9 polypeptide without the inserted heterologous amino acid or heterologous polypeptide. In some cases, a Cas9 fusion polypeptide of the present disclosure comprises: (a) a Cas9 polypeptide; and (b) a heterologous amino acid or heterologous polypeptide inserted internally within the Cas9 polypeptide, wherein the heterologous amino acid or heterologous polypeptide is inserted at a position that is immediately adjacent and N-terminal to amino acid 890 of the Cas9 protein set forth in SEQ ID NO:5, or a corresponding amino acid residue in another Cas9 polypeptide; and wherein the Cas9 fusion polypeptide retains cleavage and/or binding activity relative to the activity of the Cas9 polypeptide without the inserted heterologous amino acid or heterologous polypeptide. In some cases, the heterologous amino acid or heterologous polypeptide is inserted between residues 889 and 890, or between residues 890 and 891, of the Cas9 protein set forth in SEQ ID NO:5, or a corresponding amino acid residue in another Cas9 polypeptide.

[0117] In some cases, a Cas9 fusion polypeptide of the present disclosure comprises: (a) a Cas9 polypeptide; and (b) a heterologous amino acid or heterologous polypeptide inserted internally within the Cas9 polypeptide, wherein the heterologous amino acid or heterologous polypeptide is inserted at a position that is immediately adjacent and C-terminal to amino acid 940 of the Cas9 protein set forth in SEQ ID NO:5, or a corresponding amino acid residue in another Cas9 polypeptide; and wherein the Cas9 fusion polypeptide retains cleavage and/or binding activity relative to the activity of the Cas9 polypeptide without the inserted heterologous amino acid or heterologous polypeptide. In some cases, a Cas9 fusion polypeptide of the present disclosure comprises: (a) a Cas9 polypeptide; and (b) a heterologous amino acid or heterologous polypeptide inserted internally within the Cas9 polypeptide, wherein the heterologous amino acid or heterologous polypeptide is inserted at a position that is immediately adjacent and N-terminal to amino acid 940 of the Cas9 protein set forth in SEQ ID NO:5, or a corresponding amino acid residue in another Cas9 polypeptide; and wherein the Cas9 fusion polypeptide retains cleavage and/or binding activity relative to the activity of the Cas9 polypeptide without the inserted heterologous amino acid or heterologous polypeptide. In some cases, the heterologous amino acid or heterologous polypeptide is inserted between residues 939 and 940, or between residues 940 and 941, of the Cas9 protein set forth in SEQ ID NO:5, or a corresponding amino acid residue in another Cas9 polypeptide.

[0118] In some cases, a Cas9 fusion polypeptide of the present disclosure comprises: (a) a Cas9 polypeptide; and (b) a heterologous amino acid or heterologous polypeptide inserted internally within the Cas9 polypeptide, wherein the heterologous amino acid or heterologous polypeptide is inserted at a position that is immediately adjacent and C-terminal to amino acid 941 of the Cas9 protein set forth in SEQ ID NO:5, or a corresponding amino acid residue in another Cas9 polypeptide; and wherein the Cas9 fusion polypeptide retains cleavage and/or binding activity relative to the activity of the Cas9 polypeptide without the inserted heterologous amino acid or heterologous polypeptide. In some cases, a Cas9 fusion polypeptide of the present disclosure comprises: (a) a Cas9 polypeptide; and (b) a heterologous amino acid or heterologous polypeptide inserted internally within the Cas9 polypeptide, wherein the heterologous amino acid or heterologous polypeptide is inserted at a position that is immediately adjacent and N-terminal to amino acid 941 of the Cas9 protein set forth in SEQ ID NO:5, or a corresponding amino acid residue in another Cas9 polypeptide; and wherein the Cas9 fusion polypeptide retains cleavage and/or binding activity relative to the activity of the Cas9 polypeptide without the inserted heterologous amino acid or heterologous polypeptide. In some cases, the heterologous amino acid or heterologous polypeptide is inserted between residues 940 and 941, or between residues 941 and 942, of the Cas9 protein set forth in SEQ ID NO:5, or a corresponding amino acid residue in another Cas9 polypeptide.

[0119] In some cases, a Cas9 fusion polypeptide of the present disclosure comprises: (a) a Cas9 polypeptide; and (b) a heterologous amino acid or heterologous polypeptide inserted internally within the Cas9 polypeptide, wherein the heterologous amino acid or heterologous polypeptide is inserted at a position that is immediately adjacent and C-terminal to amino acid 944 of the Cas9 protein set forth in SEQ ID NO:5, or a corresponding amino acid residue in another Cas9 polypeptide; and wherein the Cas9 fusion polypeptide retains cleavage and/or binding activity relative to the activity of the Cas9 polypeptide without the inserted heterologous amino acid or heterologous polypeptide. In some cases, a Cas9 fusion polypeptide of the present disclosure comprises: (a) a Cas9 polypeptide; and (b) a heterologous amino acid or heterologous polypeptide inserted internally within the Cas9 polypeptide, wherein the heterologous amino acid or heterologous polypeptide is inserted at a position that is immediately adjacent and N-terminal to amino acid 944 of the Cas9 protein set forth in SEQ ID NO:5, or a corresponding amino acid residue in another Cas9 polypeptide; and wherein the Cas9 fusion polypeptide retains cleavage and/or binding activity relative to the activity of the Cas9 polypeptide without the inserted heterologous amino acid or heterologous polypeptide. In some cases, the heterologous amino acid or heterologous polypeptide is inserted between residues 943 and 944, or between residues 944 and 945, of the Cas9 protein set forth in SEQ ID NO:5, or a corresponding amino acid residue in another Cas9 polypeptide.

[0120] In some cases, a Cas9 fusion polypeptide of the present disclosure comprises: (a) a Cas9 polypeptide; and (b) a heterologous amino acid or heterologous polypeptide inserted internally within the Cas9 polypeptide, wherein the heterologous amino acid or heterologous polypeptide is inserted at a position that is immediately adjacent and C-terminal to amino acid 947 of the Cas9 protein set forth in SEQ ID NO:5, or a corresponding amino acid residue in another Cas9 polypeptide; and wherein the Cas9 fusion polypeptide retains cleavage and/or binding activity relative to the activity of the Cas9 polypeptide without the inserted heterologous amino acid or heterologous polypeptide. In some cases, a Cas9 fusion polypeptide of the present disclosure comprises: (a) a Cas9 polypeptide; and (b) a heterologous amino acid or heterologous polypeptide inserted internally within the Cas9 polypeptide, wherein the heterologous amino acid or heterologous polypeptide is inserted at a position that is immediately adjacent and N-terminal to amino acid 947 of the Cas9 protein set forth in SEQ ID NO:5, or a corresponding amino acid residue in another Cas9 polypeptide; and wherein the Cas9 fusion polypeptide retains cleavage and/or binding activity relative to the activity of the Cas9 polypeptide without the inserted heterologous amino acid or heterologous polypeptide. In some cases, the heterologous amino acid or heterologous polypeptide is inserted between residues 946 and 947, or between residues 947 and 948, of the Cas9 protein set forth in SEQ ID NO:5, or a corresponding amino acid residue in another Cas9 polypeptide.

[0121] In some cases, a Cas9 fusion polypeptide of the present disclosure comprises: (a) a Cas9 polypeptide; and (b) a heterologous amino acid or heterologous polypeptide inserted internally within the Cas9 polypeptide, wherein the heterologous amino acid or heterologous polypeptide is inserted at a position that is immediately adjacent and C-terminal to amino acid 952 of the Cas9 protein set forth in SEQ ID NO:5, or a corresponding amino acid residue in another Cas9 polypeptide; and wherein the Cas9 fusion polypeptide retains cleavage and/or binding activity relative to the activity of the Cas9 polypeptide without the inserted heterologous amino acid or heterologous polypeptide. In some cases, a Cas9 fusion polypeptide of the present disclosure comprises: (a) a Cas9 polypeptide; and (b) a heterologous amino acid or heterologous polypeptide inserted internally within the Cas9 polypeptide, wherein the heterologous amino acid or heterologous polypeptide is inserted at a position that is immediately adjacent and N-terminal to amino acid 952 of the Cas9 protein set forth in SEQ ID NO:5, or a corresponding amino acid residue in another Cas9 polypeptide; and wherein the Cas9 fusion polypeptide retains cleavage and/or binding activity relative to the activity of the Cas9 polypeptide without the inserted heterologous amino acid or heterologous polypeptide. In some cases, the heterologous amino acid or heterologous polypeptide is inserted between residues 951 and 952, or between residues 952 and 953, of the Cas9 protein set forth in SEQ ID NO:5, or a corresponding amino acid residue in another Cas9 polypeptide.

[0122] In some cases, a Cas9 fusion polypeptide of the present disclosure comprises: (a) a Cas9 polypeptide; and (b) a heterologous amino acid or heterologous polypeptide inserted internally within the Cas9 polypeptide, wherein the heterologous amino acid or heterologous polypeptide is inserted at a position that is immediately adjacent and C-terminal to amino acid 1010 of the Cas9 protein set forth in SEQ ID NO:5, or a corresponding amino acid residue in another Cas9 polypeptide; and wherein the Cas9 fusion polypeptide retains cleavage and/or binding activity relative to the activity of the Cas9 polypeptide without the inserted heterologous amino acid or heterologous polypeptide. In some cases, a Cas9 fusion polypeptide of the present disclosure comprises: (a) a Cas9 polypeptide; and (b) a heterologous amino acid or heterologous polypeptide inserted internally within the Cas9 polypeptide, wherein the heterologous amino acid or heterologous polypeptide is inserted at a position that is immediately adjacent and N-terminal to amino acid 1010 of the Cas9 protein set forth in SEQ ID NO:5, or a corresponding amino acid residue in another Cas9 polypeptide; and wherein the Cas9 fusion polypeptide retains cleavage and/or binding activity relative to the activity of the Cas9 polypeptide without the inserted heterologous amino acid or heterologous polypeptide. In some cases, the heterologous amino acid or heterologous polypeptide is inserted between residues 1009 and 1010, or between residues 1010 and 1011, of the Cas9 protein set forth in SEQ ID NO:5, or a corresponding amino acid residue in another Cas9 polypeptide.

[0123] In some cases, a Cas9 fusion polypeptide of the present disclosure comprises: (a) a Cas9 polypeptide; and (b) a heterologous amino acid or heterologous polypeptide inserted internally within the Cas9 polypeptide, wherein the heterologous amino acid or heterologous polypeptide is inserted at a position that is immediately adjacent and C-terminal to amino acid 1011 of the Cas9 protein set forth in SEQ ID NO:5, or a corresponding amino acid residue in another Cas9 polypeptide; and wherein the Cas9 fusion polypeptide retains cleavage and/or binding activity relative to the activity of the Cas9 polypeptide without the inserted heterologous amino acid or heterologous polypeptide. In some cases, a Cas9 fusion polypeptide of the present disclosure comprises: (a) a Cas9 polypeptide; and (b) a heterologous amino acid or heterologous polypeptide inserted internally within the Cas9 polypeptide, wherein the heterologous amino acid or heterologous polypeptide is inserted at a position that is immediately adjacent and N-terminal to amino acid 1011 of the Cas9 protein set forth in SEQ ID NO:5, or a corresponding amino acid residue in another Cas9 polypeptide; and wherein the Cas9 fusion polypeptide retains cleavage and/or binding activity relative to the activity of the Cas9 polypeptide without the inserted heterologous amino acid or heterologous polypeptide. In some cases, the heterologous amino acid or heterologous polypeptide is inserted between residues 1011 and 1012, or between residues 1010 and 1011, of the Cas9 protein set forth in SEQ ID NO:5, or a corresponding amino acid residue in another Cas9 polypeptide.

[0124] In some cases, a Cas9 fusion polypeptide of the present disclosure comprises: (a) a Cas9 polypeptide; and (b) a heterologous amino acid or heterologous polypeptide inserted internally within the Cas9 polypeptide, wherein the heterologous amino acid or heterologous polypeptide is inserted at a position that is immediately adjacent and C-terminal to amino acid 1012 of the Cas9 protein set forth in SEQ ID NO:5, or a corresponding amino acid residue in another Cas9 polypeptide; and wherein the Cas9 fusion polypeptide retains cleavage and/or binding activity relative to the activity of the Cas9 polypeptide without the inserted heterologous amino acid or heterologous polypeptide. In some cases, a Cas9 fusion polypeptide of the present disclosure comprises: (a) a Cas9 polypeptide; and (b) a heterologous amino acid or heterologous polypeptide inserted internally within the Cas9 polypeptide, wherein the heterologous amino acid or heterologous polypeptide is inserted at a position that is immediately adjacent and N-terminal to amino acid 1012 of the Cas9 protein set forth in SEQ ID NO:5, or a corresponding amino acid residue in another Cas9 polypeptide; and wherein the Cas9 fusion polypeptide retains cleavage and/or binding activity relative to the activity of the Cas9 polypeptide without the inserted heterologous amino acid or heterologous polypeptide. In some cases, the heterologous amino acid or heterologous polypeptide is inserted between residues 1011 and 1012, or between residues 1012 and 1013, of the Cas9 protein set forth in SEQ ID NO:5, or a corresponding amino acid residue in another Cas9 polypeptide.

[0125] In some cases, a Cas9 fusion polypeptide of the present disclosure comprises: (a) a Cas9 polypeptide; and (b) a heterologous amino acid or heterologous polypeptide inserted internally within the Cas9 polypeptide, wherein the heterologous amino acid or heterologous polypeptide is inserted at a position that is immediately adjacent and C-terminal to amino acid 1015 of the Cas9 protein set forth in SEQ ID NO:5, or a corresponding amino acid residue in another Cas9 polypeptide; and wherein the Cas9 fusion polypeptide retains cleavage and/or binding activity relative to the activity of the Cas9 polypeptide without the inserted heterologous amino acid or heterologous polypeptide. In some cases, a Cas9 fusion polypeptide of the present disclosure comprises: (a) a Cas9 polypeptide; and (b) a heterologous amino acid or heterologous polypeptide inserted internally within the Cas9 polypeptide, wherein the heterologous amino acid or heterologous polypeptide is inserted at a position that is immediately adjacent and N-terminal to amino acid 1015 of the Cas9 protein set forth in SEQ ID NO:5, or a corresponding amino acid residue in another Cas9 polypeptide; and wherein the Cas9 fusion polypeptide retains cleavage and/or binding activity relative to the activity of the Cas9 polypeptide without the inserted heterologous amino acid or heterologous polypeptide. In some cases, the heterologous amino acid or heterologous polypeptide is inserted between residues 1014 and 1015, or between residues 1015 and 1016, of the Cas9 protein set forth in SEQ ID NO:5, or a corresponding amino acid residue in another Cas9 polypeptide.

[0126] In some cases, a Cas9 fusion polypeptide of the present disclosure comprises: (a) a Cas9 polypeptide; and (b) a heterologous amino acid or heterologous polypeptide inserted internally within the Cas9 polypeptide, wherein the heterologous amino acid or heterologous polypeptide is inserted at a position that is immediately adjacent and C-terminal to amino acid 1016 of the Cas9 protein set forth in SEQ ID NO:5, or a corresponding amino acid residue in another Cas9 polypeptide; and wherein the Cas9 fusion polypeptide retains cleavage and/or binding activity relative to the activity of the Cas9 polypeptide without the inserted heterologous amino acid or heterologous polypeptide. In some cases, a Cas9 fusion polypeptide of the present disclosure comprises: (a) a Cas9 polypeptide; and (b) a heterologous amino acid or heterologous polypeptide inserted internally within the Cas9 polypeptide, wherein the heterologous amino acid or heterologous polypeptide is inserted at a position that is immediately adjacent and N-terminal to amino acid 1016 of the Cas9 protein set forth in SEQ ID NO:5, or a corresponding amino acid residue in another Cas9 polypeptide; and wherein the Cas9 fusion polypeptide retains cleavage and/or binding activity relative to the activity of the Cas9 polypeptide without the inserted heterologous amino acid or heterologous polypeptide. In some cases, the heterologous amino acid or heterologous polypeptide is inserted between residues 1015 and 1016, or between residues 1016 and 1017, of the Cas9 protein set forth in SEQ ID NO:5, or a corresponding amino acid residue in another Cas9 polypeptide.

[0127] In some cases, a Cas9 fusion polypeptide of the present disclosure comprises: (a) a Cas9 polypeptide; and (b) a heterologous amino acid or heterologous polypeptide inserted internally within the Cas9 polypeptide, wherein the heterologous amino acid or heterologous polypeptide is inserted at a position that is immediately adjacent and C-terminal to amino acid 1022 of the Cas9 protein set forth in SEQ ID NO:5, or a corresponding amino acid residue in another Cas9 polypeptide; and wherein the Cas9 fusion polypeptide retains cleavage and/or binding activity relative to the activity of the Cas9 polypeptide without the inserted heterologous amino acid or heterologous polypeptide. In some cases, a Cas9 fusion polypeptide of the present disclosure comprises: (a) a Cas9 polypeptide; and (b) a heterologous amino acid or heterologous polypeptide inserted internally within the Cas9 polypeptide, wherein the heterologous amino acid or heterologous polypeptide is inserted at a position that is immediately adjacent and N-terminal to amino acid 1022 of the Cas9 protein set forth in SEQ ID NO:5, or a corresponding amino acid residue in another Cas9 polypeptide; and wherein the Cas9 fusion polypeptide retains cleavage and/or binding activity relative to the activity of the Cas9 polypeptide without the inserted heterologous amino acid or heterologous polypeptide. In some cases, the heterologous amino acid or heterologous polypeptide is inserted between residues 1021 and 1022, or between residues 1022 and 1023, of the Cas9 protein set forth in SEQ ID NO:5, or a corresponding amino acid residue in another Cas9 polypeptide.

[0128] In some cases, a Cas9 fusion polypeptide of the present disclosure comprises: (a) a Cas9 polypeptide; and (b) a heterologous amino acid or heterologous polypeptide inserted internally within the Cas9 polypeptide, wherein the heterologous amino acid or heterologous polypeptide is inserted at a position that is immediately adjacent and C-terminal to amino acid 1026 of the Cas9 protein set forth in SEQ ID NO:5, or a corresponding amino acid residue in another Cas9 polypeptide; and wherein the Cas9 fusion polypeptide retains cleavage and/or binding activity relative to the activity of the Cas9 polypeptide without the inserted heterologous amino acid or heterologous polypeptide. In some cases, a Cas9 fusion polypeptide of the present disclosure comprises: (a) a Cas9 polypeptide; and (b) a heterologous amino acid or heterologous polypeptide inserted internally within the Cas9 polypeptide, wherein the heterologous amino acid or heterologous polypeptide is inserted at a position that is immediately adjacent and N-terminal to amino acid 1026 of the Cas9 protein set forth in SEQ ID NO:5, or a corresponding amino acid residue in another Cas9 polypeptide; and wherein the Cas9 fusion polypeptide retains cleavage and/or binding activity relative to the activity of the Cas9 polypeptide without the inserted heterologous amino acid or heterologous polypeptide. In some cases, the heterologous amino acid or heterologous polypeptide is inserted between residues 1025 and 1026, or between residues 1026 and 1027, of the Cas9 protein set forth in SEQ ID NO:5, or a corresponding amino acid residue in another Cas9 polypeptide.

[0129] In some cases, a Cas9 fusion polypeptide of the present disclosure comprises: (a) a Cas9 polypeptide; and (b) a heterologous amino acid or heterologous polypeptide inserted internally within the Cas9 polypeptide, wherein the heterologous amino acid or heterologous polypeptide is inserted at a position that is immediately adjacent and C-terminal to amino acid 1027 of the Cas9 protein set forth in SEQ ID NO:5, or a corresponding amino acid residue in another Cas9 polypeptide; and wherein the Cas9 fusion polypeptide retains cleavage and/or binding activity relative to the activity of the Cas9 polypeptide without the inserted heterologous amino acid or heterologous polypeptide. In some cases, a Cas9 fusion polypeptide of the present disclosure comprises: (a) a Cas9 polypeptide; and (b) a heterologous amino acid or heterologous polypeptide inserted internally within the Cas9 polypeptide, wherein the heterologous amino acid or heterologous polypeptide is inserted at a position that is immediately adjacent and N-terminal to amino acid 1027 of the Cas9 protein set forth in SEQ ID NO:5, or a corresponding amino acid residue in another Cas9 polypeptide; and wherein the Cas9 fusion polypeptide retains cleavage and/or binding activity relative to the activity of the Cas9 polypeptide without the inserted heterologous amino acid or heterologous polypeptide. In some cases, the heterologous amino acid or heterologous polypeptide is inserted between residues 1026 and 1027, or between residues 1027 and 1028, of the Cas9 protein set forth in SEQ ID NO:5, or a corresponding amino acid residue in another Cas9 polypeptide.

[0130] In some cases, a Cas9 fusion polypeptide of the present disclosure comprises: (a) a Cas9 polypeptide; and (b) a heterologous amino acid or heterologous polypeptide inserted internally within the Cas9 polypeptide, wherein the heterologous amino acid or heterologous polypeptide is inserted at a position that is immediately adjacent and C-terminal to amino acid 1031 of the Cas9 protein set forth in SEQ ID NO:5, or a corresponding amino acid residue in another Cas9 polypeptide; and wherein the Cas9 fusion polypeptide retains cleavage and/or binding activity relative to the activity of the Cas9 polypeptide without the inserted heterologous amino acid or heterologous polypeptide. In some cases, a Cas9 fusion polypeptide of the present disclosure comprises: (a) a Cas9 polypeptide; and (b) a heterologous amino acid or heterologous polypeptide inserted internally within the Cas9 polypeptide, wherein the heterologous amino acid or heterologous polypeptide is inserted at a position that is immediately adjacent and N-terminal to amino acid 1031 of the Cas9 protein set forth in SEQ ID NO:5, or a corresponding amino acid residue in another Cas9 polypeptide; and wherein the Cas9 fusion polypeptide retains cleavage and/or binding activity relative to the activity of the Cas9 polypeptide without the inserted heterologous amino acid or heterologous polypeptide. In some cases, the heterologous amino acid or heterologous polypeptide is inserted between residues 1030 and 1031, or between residues 1031 and 1032, of the Cas9 protein set forth in SEQ ID NO:5, or a corresponding amino acid residue in another Cas9 polypeptide.

[0131] In some cases, a Cas9 fusion polypeptide of the present disclosure comprises: (a) a Cas9 polypeptide; and (b) a heterologous amino acid or heterologous polypeptide inserted internally within the Cas9 polypeptide, wherein the heterologous amino acid or heterologous polypeptide is inserted at a position that is immediately adjacent and C-terminal to amino acid 1034 of the Cas9 protein set forth in SEQ ID NO:5, or a corresponding amino acid residue in another Cas9 polypeptide; and wherein the Cas9 fusion polypeptide retains cleavage and/or binding activity relative to the activity of the Cas9 polypeptide without the inserted heterologous amino acid or heterologous polypeptide. In some cases, a Cas9 fusion polypeptide of the present disclosure comprises: (a) a Cas9 polypeptide; and (b) a heterologous amino acid or heterologous polypeptide inserted internally within the Cas9 polypeptide, wherein the heterologous amino acid or heterologous polypeptide is inserted at a position that is immediately adjacent and N-terminal to amino acid 1034 of the Cas9 protein set forth in SEQ ID NO:5, or a corresponding amino acid residue in another Cas9 polypeptide; and wherein the Cas9 fusion polypeptide retains cleavage and/or binding activity relative to the activity of the Cas9 polypeptide without the inserted heterologous amino acid or heterologous polypeptide. In some cases, the heterologous amino acid or heterologous polypeptide is inserted between residues 1033 and 1034, or between residues 1034 and 1035, of the Cas9 protein set forth in SEQ ID NO:5, or a corresponding amino acid residue in another Cas9 polypeptide.

[0132] In some cases, a Cas9 fusion polypeptide of the present disclosure comprises: (a) a Cas9 polypeptide; and (b) a heterologous amino acid or heterologous polypeptide inserted internally within the Cas9 polypeptide, wherein the heterologous amino acid or heterologous polypeptide is inserted at a position that is immediately adjacent and C-terminal to amino acid 1046 of the Cas9 protein set forth in SEQ ID NO:5, or a corresponding amino acid residue in another Cas9 polypeptide; and wherein the Cas9 fusion polypeptide retains cleavage and/or binding activity relative to the activity of the Cas9 polypeptide without the inserted heterologous amino acid or heterologous polypeptide. In some cases, a Cas9 fusion polypeptide of the present disclosure comprises: (a) a Cas9 polypeptide; and (b) a heterologous amino acid or heterologous polypeptide inserted internally within the Cas9 polypeptide, wherein the heterologous amino acid or heterologous polypeptide is inserted at a position that is immediately adjacent and N-terminal to amino acid 1046 of the Cas9 protein set forth in SEQ ID NO:5, or a corresponding amino acid residue in another Cas9 polypeptide; and wherein the Cas9 fusion polypeptide retains cleavage and/or binding activity relative to the activity of the Cas9 polypeptide without the inserted heterologous amino acid or heterologous polypeptide. In some cases, the heterologous amino acid or heterologous polypeptide is inserted between residues 1045 and 1046, or between residues 1046 and 1047, of the Cas9 protein set forth in SEQ ID NO:5, or a corresponding amino acid residue in another Cas9 polypeptide.

[0133] In some cases, a Cas9 fusion polypeptide of the present disclosure comprises: (a) a Cas9 polypeptide; and (b) a heterologous amino acid or heterologous polypeptide inserted internally within the Cas9 polypeptide, wherein the heterologous amino acid or heterologous polypeptide is inserted at a position that is immediately adjacent and C-terminal to amino acid 1047 of the Cas9 protein set forth in SEQ ID NO:5, or a corresponding amino acid residue in another Cas9 polypeptide; and wherein the Cas9 fusion polypeptide retains cleavage and/or binding activity relative to the activity of the Cas9 polypeptide without the inserted heterologous amino acid or heterologous polypeptide. In some cases, a Cas9 fusion polypeptide of the present disclosure comprises: (a) a Cas9 polypeptide; and (b) a heterologous amino acid or heterologous polypeptide inserted internally within the Cas9 polypeptide, wherein the heterologous amino acid or heterologous polypeptide is inserted at a position that is immediately adjacent and N-terminal to amino acid 1047 of the Cas9 protein set forth in SEQ ID NO:5, or a corresponding amino acid residue in another Cas9 polypeptide; and wherein the Cas9 fusion polypeptide retains cleavage and/or binding activity relative to the activity of the Cas9 polypeptide without the inserted heterologous amino acid or heterologous polypeptide. In some cases, the heterologous amino acid or heterologous polypeptide is inserted between residues 1046 and 1047, or between residues 1047 and 1048, of the Cas9 protein set forth in SEQ ID NO:5, or a corresponding amino acid residue in another Cas9 polypeptide.

[0134] In some cases, a Cas9 fusion polypeptide of the present disclosure comprises: (a) a Cas9 polypeptide; and (b) a heterologous amino acid or heterologous polypeptide inserted internally within the Cas9 polypeptide, wherein the heterologous amino acid or heterologous polypeptide is inserted at a position that is immediately adjacent and C-terminal to amino acid 1049 of the Cas9 protein set forth in SEQ ID NO:5, or a corresponding amino acid residue in another Cas9 polypeptide; and wherein the Cas9 fusion polypeptide retains cleavage and/or binding activity relative to the activity of the Cas9 polypeptide without the inserted heterologous amino acid or heterologous polypeptide. In some cases, a Cas9 fusion polypeptide of the present disclosure comprises: (a) a Cas9 polypeptide; and (b) a heterologous amino acid or heterologous polypeptide inserted internally within the Cas9 polypeptide, wherein the heterologous amino acid or heterologous polypeptide is inserted at a position that is immediately adjacent and N-terminal to amino acid 1049 of the Cas9 protein set forth in SEQ ID NO:5, or a corresponding amino acid residue in another Cas9 polypeptide; and wherein the Cas9 fusion polypeptide retains cleavage and/or binding activity relative to the activity of the Cas9 polypeptide without the inserted heterologous amino acid or heterologous polypeptide. In some cases, the heterologous amino acid or heterologous polypeptide is inserted between residues 1048 and 1049, or between residues 1049 and 1050, of the Cas9 protein set forth in SEQ ID NO:5, or a corresponding amino acid residue in another Cas9 polypeptide.

[0135] In some cases, a Cas9 fusion polypeptide of the present disclosure comprises: (a) a Cas9 polypeptide; and (b) a heterologous amino acid or heterologous polypeptide inserted internally within the Cas9 polypeptide, wherein the heterologous amino acid or heterologous polypeptide is inserted at a position that is immediately adjacent and C-terminal to amino acid 1050 of the Cas9 protein set forth in SEQ ID NO:5, or a corresponding amino acid residue in another Cas9 polypeptide; and wherein the Cas9 fusion polypeptide retains cleavage and/or binding activity relative to the activity of the Cas9 polypeptide without the inserted heterologous amino acid or heterologous polypeptide. In some cases, a Cas9 fusion polypeptide of the present disclosure comprises: (a) a Cas9 polypeptide; and (b) a heterologous amino acid or heterologous polypeptide inserted internally within the Cas9 polypeptide, wherein the heterologous amino acid or heterologous polypeptide is inserted at a position that is immediately adjacent and N-terminal to amino acid 1050 of the Cas9 protein set forth in SEQ ID NO:5, or a corresponding amino acid residue in another Cas9 polypeptide; and wherein the Cas9 fusion polypeptide retains cleavage and/or binding activity relative to the activity of the Cas9 polypeptide without the inserted heterologous amino acid or heterologous polypeptide. In some cases, the heterologous amino acid or heterologous polypeptide is inserted between residues 1049 and 1050, or between residues 1050 and 1051, of the Cas9 protein set forth in SEQ ID NO:5, or a corresponding amino acid residue in another Cas9 polypeptide.

[0136] In some cases, a Cas9 fusion polypeptide of the present disclosure comprises: (a) a Cas9 polypeptide; and (b) a heterologous amino acid or heterologous polypeptide inserted internally within the Cas9 polypeptide, wherein the heterologous amino acid or heterologous polypeptide is inserted at a position that is immediately adjacent and C-terminal to amino acid 1051 of the Cas9 protein set forth in SEQ ID NO:5, or a corresponding amino acid residue in another Cas9 polypeptide; and wherein the Cas9 fusion polypeptide retains cleavage and/or binding activity relative to the activity of the Cas9 polypeptide without the inserted heterologous amino acid or heterologous polypeptide. In some cases, a Cas9 fusion polypeptide of the present disclosure comprises: (a) a Cas9 polypeptide; and (b) a heterologous amino acid or heterologous polypeptide inserted internally within the Cas9 polypeptide, wherein the heterologous amino acid or heterologous polypeptide is inserted at a position that is immediately adjacent and N-terminal to amino acid 1051 of the Cas9 protein set forth in SEQ ID NO:5, or a corresponding amino acid residue in another Cas9 polypeptide; and wherein the Cas9 fusion polypeptide retains cleavage and/or binding activity relative to the activity of the Cas9 polypeptide without the inserted heterologous amino acid or heterologous polypeptide. In some cases, the heterologous amino acid or heterologous polypeptide is inserted between residues 1050 and 1051, or between residues 1051 and 1052, of the Cas9 protein set forth in SEQ ID NO:5, or a corresponding amino acid residue in another Cas9 polypeptide.

[0137] In some cases, a Cas9 fusion polypeptide of the present disclosure comprises: (a) a Cas9 polypeptide; and (b) a heterologous amino acid or heterologous polypeptide inserted internally within the Cas9 polypeptide, wherein the heterologous amino acid or heterologous polypeptide is inserted at a position that is immediately adjacent and C-terminal to amino acid 1052 of the Cas9 protein set forth in SEQ ID NO:5, or a corresponding amino acid residue in another Cas9 polypeptide; and wherein the Cas9 fusion polypeptide retains cleavage and/or binding activity relative to the activity of the Cas9 polypeptide without the inserted heterologous amino acid or heterologous polypeptide. In some cases, a Cas9 fusion polypeptide of the present disclosure comprises: (a) a Cas9 polypeptide; and (b) a heterologous amino acid or heterologous polypeptide inserted internally within the Cas9 polypeptide, wherein the heterologous amino acid or heterologous polypeptide is inserted at a position that is immediately adjacent and N-terminal to amino acid 1052 of the Cas9 protein set forth in SEQ ID NO:5, or a corresponding amino acid residue in another Cas9 polypeptide; and wherein the Cas9 fusion polypeptide retains cleavage and/or binding activity relative to the activity of the Cas9 polypeptide without the inserted heterologous amino acid or heterologous polypeptide. In some cases, the heterologous amino acid or heterologous polypeptide is inserted between residues 1051 and 1052, or between residues 1052 and 1053, of the Cas9 protein set forth in SEQ ID NO:5, or a corresponding amino acid residue in another Cas9 polypeptide.

[0138] In some cases, a Cas9 fusion polypeptide of the present disclosure comprises: (a) a Cas9 polypeptide; and (b) a heterologous amino acid or heterologous polypeptide inserted internally within the Cas9 polypeptide, wherein the heterologous amino acid or heterologous polypeptide is inserted at a position that is immediately adjacent and C-terminal to amino acid 1053 of the Cas9 protein set forth in SEQ ID NO:5, or a corresponding amino acid residue in another Cas9 polypeptide; and wherein the Cas9 fusion polypeptide retains cleavage and/or binding activity relative to the activity of the Cas9 polypeptide without the inserted heterologous amino acid or heterologous polypeptide. In some cases, a Cas9 fusion polypeptide of the present disclosure comprises: (a) a Cas9 polypeptide; and (b) a heterologous amino acid or heterologous polypeptide inserted internally within the Cas9 polypeptide, wherein the heterologous amino acid or heterologous polypeptide is inserted at a position that is immediately adjacent and H-terminal to amino acid 1053 of the Cas9 protein set forth in SEQ ID NO:5, or a corresponding amino acid residue in another Cas9 polypeptide; and wherein the Cas9 fusion polypeptide retains cleavage and/or binding activity relative to the activity of the Cas9 polypeptide without the inserted heterologous amino acid or heterologous polypeptide. In some cases, the heterologous amino acid or heterologous polypeptide is inserted between residues 1052 and 1053, or between residues 1053 and 1054, of the Cas9 protein set forth in SEQ ID NO:5, or a corresponding amino acid residue in another Cas9 polypeptide.

[0139] In some cases, a Cas9 fusion polypeptide of the present disclosure comprises: (a) a Cas9 polypeptide; and (b) a heterologous amino acid or heterologous polypeptide inserted internally within the Cas9 polypeptide, wherein the heterologous amino acid or heterologous polypeptide is inserted at a position that is immediately adjacent and C-terminal to amino acid 1054 of the Cas9 protein set forth in SEQ ID NO:5, or a corresponding amino acid residue in another Cas9 polypeptide; and wherein the Cas9 fusion polypeptide retains cleavage and/or binding activity relative to the activity of the Cas9 polypeptide without the inserted heterologous amino acid or heterologous polypeptide. In some cases, a Cas9 fusion polypeptide of the present disclosure comprises: (a) a Cas9 polypeptide; and (b) a heterologous amino acid or heterologous polypeptide inserted internally within the Cas9 polypeptide, wherein the heterologous amino acid or heterologous polypeptide is inserted at a position that is immediately adjacent and N-terminal to amino acid 1054 of the Cas9 protein set forth in SEQ ID NO:5, or a corresponding amino acid residue in another Cas9 polypeptide; and wherein the Cas9 fusion polypeptide retains cleavage and/or binding activity relative to the activity of the Cas9 polypeptide without the inserted heterologous amino acid or heterologous polypeptide. In some cases, the heterologous amino acid or heterologous polypeptide is inserted between residues 1053 and 1054, or between residues 1054 and 1055, of the Cas9 protein set forth in SEQ ID NO:5, or a corresponding amino acid residue in another Cas9 polypeptide.

[0140] In some cases, a Cas9 fusion polypeptide of the present disclosure comprises: (a) a Cas9 polypeptide; and (b) a heterologous amino acid or heterologous polypeptide inserted internally within the Cas9 polypeptide, wherein the heterologous amino acid or heterologous polypeptide is inserted at a position that is immediately adjacent and C-terminal to amino acid 1056 of the Cas9 protein set forth in SEQ ID NO:5, or a corresponding amino acid residue in another Cas9 polypeptide; and wherein the Cas9 fusion polypeptide retains cleavage and/or binding activity relative to the activity of the Cas9 polypeptide without the inserted heterologous amino acid or heterologous polypeptide. In some cases, a Cas9 fusion polypeptide of the present disclosure comprises: (a) a Cas9 polypeptide; and (b) a heterologous amino acid or heterologous polypeptide inserted internally within the Cas9 polypeptide, wherein the heterologous amino acid or heterologous polypeptide is inserted at a position that is immediately adjacent and N-terminal to amino acid 1056 of the Cas9 protein set forth in SEQ ID NO:5, or a corresponding amino acid residue in another Cas9 polypeptide; and wherein the Cas9 fusion polypeptide retains cleavage and/or binding activity relative to the activity of the Cas9 polypeptide without the inserted heterologous amino acid or heterologous polypeptide. In some cases, the heterologous amino acid or heterologous polypeptide is inserted between residues 1055 and 1056, or between residues 1056 and 1057, of the Cas9 protein set forth in SEQ ID NO:5, or a corresponding amino acid residue in another Cas9 polypeptide.

[0141] In some cases, a Cas9 fusion polypeptide of the present disclosure comprises: (a) a Cas9 polypeptide; and (b) a heterologous amino acid or heterologous polypeptide inserted internally within the Cas9 polypeptide, wherein the heterologous amino acid or heterologous polypeptide is inserted at a position that is immediately adjacent and C-terminal to amino acid 1058 of the Cas9 protein set forth in SEQ ID NO:5, or a corresponding amino acid residue in another Cas9 polypeptide; and wherein the Cas9 fusion polypeptide retains cleavage and/or binding activity relative to the activity of the Cas9 polypeptide without the inserted heterologous amino acid or heterologous polypeptide. In some cases, a Cas9 fusion polypeptide of the present disclosure comprises: (a) a Cas9 polypeptide; and (b) a heterologous amino acid or heterologous polypeptide inserted internally within the Cas9 polypeptide, wherein the heterologous amino acid or heterologous polypeptide is inserted at a position that is immediately adjacent and N-terminal to amino acid 1058 of the Cas9 protein set forth in SEQ ID NO:5, or a corresponding amino acid residue in another Cas9 polypeptide; and wherein the Cas9 fusion polypeptide retains cleavage and/or binding activity relative to the activity of the Cas9 polypeptide without the inserted heterologous amino acid or heterologous polypeptide. In some cases, the heterologous amino acid or heterologous polypeptide is inserted between residues 1057 and 1058, or between residues 1058 and 1059, of the Cas9 protein set forth in SEQ ID NO:5, or a corresponding amino acid residue in another Cas9 polypeptide.

[0142] In some cases, a Cas9 fusion polypeptide of the present disclosure comprises: (a) a Cas9 polypeptide; and (b) a heterologous amino acid or heterologous polypeptide inserted internally within the Cas9 polypeptide, wherein the heterologous amino acid or heterologous polypeptide is inserted at a position that is immediately adjacent and C-terminal to amino acid 1061 of the Cas9 protein set forth in SEQ ID NO:5, or a corresponding amino acid residue in another Cas9 polypeptide; and wherein the Cas9 fusion polypeptide retains cleavage and/or binding activity relative to the activity of the Cas9 polypeptide without the inserted heterologous amino acid or heterologous polypeptide. In some cases, a Cas9 fusion polypeptide of the present disclosure comprises: (a) a Cas9 polypeptide; and (b) a heterologous amino acid or heterologous polypeptide inserted internally within the Cas9 polypeptide, wherein the heterologous amino acid or heterologous polypeptide is inserted at a position that is immediately adjacent and N-terminal to amino acid 1061 of the Cas9 protein set forth in SEQ ID NO:5, or a corresponding amino acid residue in another Cas9 polypeptide; and wherein the Cas9 fusion polypeptide retains cleavage and/or binding activity relative to the activity of the Cas9 polypeptide without the inserted heterologous amino acid or heterologous polypeptide. In some cases, the heterologous amino acid or heterologous polypeptide is inserted between residues 1060 and 1061, or between residues 1061 and 1062, of the Cas9 protein set forth in SEQ ID NO:5, or a corresponding amino acid residue in another Cas9 polypeptide.

[0143] In some cases, a Cas9 fusion polypeptide of the present disclosure comprises: (a) a Cas9 polypeptide; and (b) a heterologous amino acid or heterologous polypeptide inserted internally within the Cas9 polypeptide, wherein the heterologous amino acid or heterologous polypeptide is inserted at a position that is immediately adjacent and C-terminal to amino acid 1062 of the Cas9 protein set forth in SEQ ID NO:5, or a corresponding amino acid residue in another Cas9 polypeptide; and wherein the Cas9 fusion polypeptide retains cleavage and/or binding activity relative to the activity of the Cas9 polypeptide without the inserted heterologous amino acid or heterologous polypeptide. In some cases, a Cas9 fusion polypeptide of the present disclosure comprises: (a) a Cas9 polypeptide; and (b) a heterologous amino acid or heterologous polypeptide inserted internally within the Cas9 polypeptide, wherein the heterologous amino acid or heterologous polypeptide is inserted at a position that is immediately adjacent and N-terminal to amino acid 1062 of the Cas9 protein set forth in SEQ ID NO:5, or a corresponding amino acid residue in another Cas9 polypeptide; and wherein the Cas9 fusion polypeptide retains cleavage and/or binding activity relative to the activity of the Cas9 polypeptide without the inserted heterologous amino acid or heterologous polypeptide. In some cases, the heterologous amino acid or heterologous polypeptide is inserted between residues 1061 and 1062, or between residues 1062 and 1063, of the Cas9 protein set forth in SEQ ID NO:5, or a corresponding amino acid residue in another Cas9 polypeptide.

[0144] In some cases, a Cas9 fusion polypeptide of the present disclosure comprises: (a) a Cas9 polypeptide; and (b) a heterologous amino acid or heterologous polypeptide inserted internally within the Cas9 polypeptide, wherein the heterologous amino acid or heterologous polypeptide is inserted at a position that is immediately adjacent and C-terminal to amino acid 1063 of the Cas9 protein set forth in SEQ ID NO:5, or a corresponding amino acid residue in another Cas9 polypeptide; and wherein the Cas9 fusion polypeptide retains cleavage and/or binding activity relative to the activity of the Cas9 polypeptide without the inserted heterologous amino acid or heterologous polypeptide. In some cases, a Cas9 fusion polypeptide of the present disclosure comprises: (a) a Cas9 polypeptide; and (b) a heterologous amino acid or heterologous polypeptide inserted internally within the Cas9 polypeptide, wherein the heterologous amino acid or heterologous polypeptide is inserted at a position that is immediately adjacent and N-terminal to amino acid 1063 of the Cas9 protein set forth in SEQ ID NO:5, or a corresponding amino acid residue in another Cas9 polypeptide; and wherein the Cas9 fusion polypeptide retains cleavage and/or binding activity relative to the activity of the Cas9 polypeptide without the inserted heterologous amino acid or heterologous polypeptide. In some cases, the heterologous amino acid or heterologous polypeptide is inserted between residues 1062-1063, or between residues 1063-1064, of the Cas9 protein set forth in SEQ ID NO:5, or a corresponding amino acid residue in another Cas9 polypeptide.

[0145] In some cases, a Cas9 fusion polypeptide of the present disclosure comprises: (a) a Cas9 polypeptide; and (b) a heterologous amino acid or heterologous polypeptide inserted internally within the Cas9 polypeptide, wherein the heterologous amino acid or heterologous polypeptide is inserted at a position that is immediately adjacent and C-terminal to amino acid 1064 of the Cas9 protein set forth in SEQ ID NO:5, or a corresponding amino acid residue in another Cas9 polypeptide; and wherein the Cas9 fusion polypeptide retains cleavage and/or binding activity relative to the activity of the Cas9 polypeptide without the inserted heterologous amino acid or heterologous polypeptide. In some cases, a Cas9 fusion polypeptide of the present disclosure comprises: (a) a Cas9 polypeptide; and (b) a heterologous amino acid or heterologous polypeptide inserted internally within the Cas9 polypeptide, wherein the heterologous amino acid or heterologous polypeptide is inserted at a position that is immediately adjacent and N-terminal to amino acid 1064 of the Cas9 protein set forth in SEQ ID NO:5, or a corresponding amino acid residue in another Cas9 polypeptide; and wherein the Cas9 fusion polypeptide retains cleavage and/or binding activity relative to the activity of the Cas9 polypeptide without the inserted heterologous amino acid or heterologous polypeptide. In some cases, the heterologous amino acid or heterologous polypeptide is inserted between residues 1063-1064, or between residues 1064-1065, of the Cas9 protein set forth in SEQ ID NO:5, or a corresponding amino acid residue in another Cas9 polypeptide.

[0146] In some cases, a Cas9 fusion polypeptide of the present disclosure comprises: (a) a Cas9 polypeptide; and (b) a heterologous amino acid or heterologous polypeptide inserted internally within the Cas9 polypeptide, wherein the heterologous amino acid or heterologous polypeptide is inserted at a position that is immediately adjacent and C-terminal to amino acid 1065 of the Cas9 protein set forth in SEQ ID NO:5, or a corresponding amino acid residue in another Cas9 polypeptide; and wherein the Cas9 fusion polypeptide retains cleavage and/or binding activity relative to the activity of the Cas9 polypeptide without the inserted heterologous amino acid or heterologous polypeptide. In some cases, a Cas9 fusion polypeptide of the present disclosure comprises: (a) a Cas9 polypeptide; and (b) a heterologous amino acid or heterologous polypeptide inserted internally within the Cas9 polypeptide, wherein the heterologous amino acid or heterologous polypeptide is inserted at a position that is immediately adjacent and N-terminal to amino acid 1065 of the Cas9 protein set forth in SEQ ID NO:5, or a corresponding amino acid residue in another Cas9 polypeptide; and wherein the Cas9 fusion polypeptide retains cleavage and/or binding activity relative to the activity of the Cas9 polypeptide without the inserted heterologous amino acid or heterologous polypeptide. In some cases, the heterologous amino acid or heterologous polypeptide is inserted between residues 1064-1065, or between residues 1065-1066, of the Cas9 protein set forth in SEQ ID NO:5, or a corresponding amino acid residue in another Cas9 polypeptide.

[0147] In some cases, a Cas9 fusion polypeptide of the present disclosure comprises: (a) a Cas9 polypeptide; and (b) a heterologous amino acid or heterologous polypeptide inserted internally within the Cas9 polypeptide, wherein the heterologous amino acid or heterologous polypeptide is inserted at a position that is immediately adjacent and C-terminal to amino acid 1068 of the Cas9 protein set forth in SEQ ID NO:5, or a corresponding amino acid residue in another Cas9 polypeptide; and wherein the Cas9 fusion polypeptide retains cleavage and/or binding activity relative to the activity of the Cas9 polypeptide without the inserted heterologous amino acid or heterologous polypeptide. In some cases, a Cas9 fusion polypeptide of the present disclosure comprises: (a) a Cas9 polypeptide; and (b) a heterologous amino acid or heterologous polypeptide inserted internally within the Cas9 polypeptide, wherein the heterologous amino acid or heterologous polypeptide is inserted at a position that is immediately adjacent and N-terminal to amino acid 1068 of the Cas9 protein set forth in SEQ ID NO:5, or a corresponding amino acid residue in another Cas9 polypeptide; and wherein the Cas9 fusion polypeptide retains cleavage and/or binding activity relative to the activity of the Cas9 polypeptide without the inserted heterologous amino acid or heterologous polypeptide. In some cases, the heterologous amino acid or heterologous polypeptide is inserted between residues 1067-1068, or between residues 1068-1069, of the Cas9 protein set forth in SEQ ID NO:5, or a corresponding amino acid residue in another Cas9 polypeptide.

[0148] In some cases, a Cas9 fusion polypeptide of the present disclosure comprises: (a) a Cas9 polypeptide; and (b) a heterologous amino acid or heterologous polypeptide inserted internally within the Cas9 polypeptide, wherein the heterologous amino acid or heterologous polypeptide is inserted at a position that is immediately adjacent and C-terminal to amino acid 1070 of the Cas9 protein set forth in SEQ ID NO:5, or a corresponding amino acid residue in another Cas9 polypeptide; and wherein the Cas9 fusion polypeptide retains cleavage and/or binding activity relative to the activity of the Cas9 polypeptide without the inserted heterologous amino acid or heterologous polypeptide. In some cases, a Cas9 fusion polypeptide of the present disclosure comprises: (a) a Cas9 polypeptide; and (b) a heterologous amino acid or heterologous polypeptide inserted internally within the Cas9 polypeptide, wherein the heterologous amino acid or heterologous polypeptide is inserted at a position that is immediately adjacent and N-terminal to amino acid 1070 of the Cas9 protein set forth in SEQ ID NO:5, or a corresponding amino acid residue in another Cas9 polypeptide; and wherein the Cas9 fusion polypeptide retains cleavage and/or binding activity relative to the activity of the Cas9 polypeptide without the inserted heterologous amino acid or heterologous polypeptide. In some cases, the heterologous amino acid or heterologous polypeptide is inserted between residues 1069-1070, or between residues 1070-1071, of the Cas9 protein set forth in SEQ ID NO:5, or a corresponding amino acid residue in another Cas9 polypeptide.

[0149] In some cases, a Cas9 fusion polypeptide of the present disclosure comprises: (a) a Cas9 polypeptide; and (b) a heterologous amino acid or heterologous polypeptide inserted internally within the Cas9 polypeptide, wherein the heterologous amino acid or heterologous polypeptide is inserted at a position that is immediately adjacent and C-terminal to amino acid 1071 of the Cas9 protein set forth in SEQ ID NO:5, or a corresponding amino acid residue in another Cas9 polypeptide; and wherein the Cas9 fusion polypeptide retains cleavage and/or binding activity relative to the activity of the Cas9 polypeptide without the inserted heterologous amino acid or heterologous polypeptide. In some cases, a Cas9 fusion polypeptide of the present disclosure comprises: (a) a Cas9 polypeptide; and (b) a heterologous amino acid or heterologous polypeptide inserted internally within the Cas9 polypeptide, wherein the heterologous amino acid or heterologous polypeptide is inserted at a position that is immediately adjacent and N-terminal to amino acid 1071 of the Cas9 protein set forth in SEQ ID NO:5, or a corresponding amino acid residue in another Cas9 polypeptide; and wherein the Cas9 fusion polypeptide retains cleavage and/or binding activity relative to the activity of the Cas9 polypeptide without the inserted heterologous amino acid or heterologous polypeptide. In some cases, the heterologous amino acid or heterologous polypeptide is inserted between residues 1070-1071, or between residues 1071-1072, of the Cas9 protein set forth in SEQ ID NO:5, or a corresponding amino acid residue in another Cas9 polypeptide.

[0150] In some cases, a Cas9 fusion polypeptide of the present disclosure comprises: (a) a Cas9 polypeptide; and (b) a heterologous amino acid or heterologous polypeptide inserted internally within the Cas9 polypeptide, wherein the heterologous amino acid or heterologous polypeptide is inserted at a position that is immediately adjacent and C-terminal to amino acid 1073 of the Cas9 protein set forth in SEQ ID NO:5, or a corresponding amino acid residue in another Cas9 polypeptide; and wherein the Cas9 fusion polypeptide retains cleavage and/or binding activity relative to the activity of the Cas9 polypeptide without the inserted heterologous amino acid or heterologous polypeptide. In some cases, a Cas9 fusion polypeptide of the present disclosure comprises: (a) a Cas9 polypeptide; and (b) a heterologous amino acid or heterologous polypeptide inserted internally within the Cas9 polypeptide, wherein the heterologous amino acid or heterologous polypeptide is inserted at a position that is immediately adjacent and N-terminal to amino acid 1073 of the Cas9 protein set forth in SEQ ID NO:5, or a corresponding amino acid residue in another Cas9 polypeptide; and wherein the Cas9 fusion polypeptide retains cleavage and/or binding activity relative to the activity of the Cas9 polypeptide without the inserted heterologous amino acid or heterologous polypeptide. In some cases, the heterologous amino acid or heterologous polypeptide is inserted between residues 1072-1073, or between residues 1073-1074, of the Cas9 protein set forth in SEQ ID NO:5, or a corresponding amino acid residue in another Cas9 polypeptide.

[0151] In some cases, a Cas9 fusion polypeptide of the present disclosure comprises: (a) a Cas9 polypeptide; and (b) a heterologous amino acid or heterologous polypeptide inserted internally within the Cas9 polypeptide, wherein the heterologous amino acid or heterologous polypeptide is inserted at a position that is immediately adjacent and C-terminal to amino acid 1145 of the Cas9 protein set forth in SEQ ID NO:5, or a corresponding amino acid residue in another Cas9 polypeptide; and wherein the Cas9 fusion polypeptide retains cleavage and/or binding activity relative to the activity of the Cas9 polypeptide without the inserted heterologous amino acid or heterologous polypeptide. In some cases, a Cas9 fusion polypeptide of the present disclosure comprises: (a) a Cas9 polypeptide; and (b) a heterologous amino acid or heterologous polypeptide inserted internally within the Cas9 polypeptide, wherein the heterologous amino acid or heterologous polypeptide is inserted at a position that is immediately adjacent and N-terminal to amino acid 1145 of the Cas9 protein set forth in SEQ ID NO:5, or a corresponding amino acid residue in another Cas9 polypeptide; and wherein the Cas9 fusion polypeptide retains cleavage and/or binding activity relative to the activity of the Cas9 polypeptide without the inserted heterologous amino acid or heterologous polypeptide. In some cases, the heterologous amino acid or heterologous polypeptide is inserted between residues 1144-1145, or between residues 1145-1146, of the Cas9 protein set forth in SEQ ID NO:5, or a corresponding amino acid residue in another Cas9 polypeptide.

[0152] In some cases, a Cas9 fusion polypeptide of the present disclosure comprises: (a) a Cas9 polypeptide; and (b) a heterologous amino acid or heterologous polypeptide inserted internally within the Cas9 polypeptide, wherein the heterologous amino acid or heterologous polypeptide is inserted at a position that is immediately adjacent and C-terminal to amino acid 1148 of the Cas9 protein set forth in SEQ ID NO:5, or a corresponding amino acid residue in another Cas9 polypeptide; and wherein the Cas9 fusion polypeptide retains cleavage and/or binding activity relative to the activity of the Cas9 polypeptide without the inserted heterologous amino acid or heterologous polypeptide. In some cases, a Cas9 fusion polypeptide of the present disclosure comprises: (a) a Cas9 polypeptide; and (b) a heterologous amino acid or heterologous polypeptide inserted internally within the Cas9 polypeptide, wherein the heterologous amino acid or heterologous polypeptide is inserted at a position that is immediately adjacent and N-terminal to amino acid 1148 of the Cas9 protein set forth in SEQ ID NO:5, or a corresponding amino acid residue in another Cas9 polypeptide; and wherein the Cas9 fusion polypeptide retains cleavage and/or binding activity relative to the activity of the Cas9 polypeptide without the inserted heterologous amino acid or heterologous polypeptide. In some cases, the heterologous amino acid or heterologous polypeptide is inserted between residues 1147-1148, or between residues 1148-1149, of the Cas9 protein set forth in SEQ ID NO:5, or a corresponding amino acid residue in another Cas9 polypeptide.

[0153] In some cases, a Cas9 fusion polypeptide of the present disclosure comprises: (a) a Cas9 polypeptide; and (b) a heterologous amino acid or heterologous polypeptide inserted internally within the Cas9 polypeptide, wherein the heterologous amino acid or heterologous polypeptide is inserted at a position that is immediately adjacent and C-terminal to amino acid 1149 of the Cas9 protein set forth in SEQ ID NO:5, or a corresponding amino acid residue in another Cas9 polypeptide; and wherein the Cas9 fusion polypeptide retains cleavage and/or binding activity relative to the activity of the Cas9 polypeptide without the inserted heterologous amino acid or heterologous polypeptide. In some cases, a Cas9 fusion polypeptide of the present disclosure comprises: (a) a Cas9 polypeptide; and (b) a heterologous amino acid or heterologous polypeptide inserted internally within the Cas9 polypeptide, wherein the heterologous amino acid or heterologous polypeptide is inserted at a position that is immediately adjacent and N-terminal to amino acid 1149 of the Cas9 protein set forth in SEQ ID NO:5, or a corresponding amino acid residue in another Cas9 polypeptide; and wherein the Cas9 fusion polypeptide retains cleavage and/or binding activity relative to the activity of the Cas9 polypeptide without the inserted heterologous amino acid or heterologous polypeptide. In some cases, the heterologous amino acid or heterologous polypeptide is inserted between residues 1148-1149, or between residues 1149-1150, of the Cas9 protein set forth in SEQ ID NO:5, or a corresponding amino acid residue in another Cas9 polypeptide.

[0154] In some cases, a Cas9 fusion polypeptide of the present disclosure comprises: (a) a Cas9 polypeptide; and (b) a heterologous amino acid or heterologous polypeptide inserted internally within the Cas9 polypeptide, wherein the heterologous amino acid or heterologous polypeptide is inserted at a position that is immediately adjacent and C-terminal to amino acid 1152 of the Cas9 protein set forth in SEQ ID NO:5, or a corresponding amino acid residue in another Cas9 polypeptide; and wherein the Cas9 fusion polypeptide retains cleavage and/or binding activity relative to the activity of the Cas9 polypeptide without the inserted heterologous amino acid or heterologous polypeptide. In some cases, a Cas9 fusion polypeptide of the present disclosure comprises: (a) a Cas9 polypeptide; and (b) a heterologous amino acid or heterologous polypeptide inserted internally within the Cas9 polypeptide, wherein the heterologous amino acid or heterologous polypeptide is inserted at a position that is immediately adjacent and N-terminal to amino acid 1152 of the Cas9 protein set forth in SEQ ID NO:5, or a corresponding amino acid residue in another Cas9 polypeptide; and wherein the Cas9 fusion polypeptide retains cleavage and/or binding activity relative to the activity of the Cas9 polypeptide without the inserted heterologous amino acid or heterologous polypeptide. In some cases, the heterologous amino acid or heterologous polypeptide is inserted between residues 1151-1152, or between residues 1152-1153, of the Cas9 protein set forth in SEQ ID NO:5, or a corresponding amino acid residue in another Cas9 polypeptide.

[0155] In some cases, a Cas9 fusion polypeptide of the present disclosure comprises: (a) a Cas9 polypeptide; and (b) a heterologous amino acid or heterologous polypeptide inserted internally within the Cas9 polypeptide, wherein the heterologous amino acid or heterologous polypeptide is inserted at a position that is immediately adjacent and C-terminal to amino acid 1153 of the Cas9 protein set forth in SEQ ID NO:5, or a corresponding amino acid residue in another Cas9 polypeptide; and wherein the Cas9 fusion polypeptide retains cleavage and/or binding activity relative to the activity of the Cas9 polypeptide without the inserted heterologous amino acid or heterologous polypeptide. In some cases, a Cas9 fusion polypeptide of the present disclosure comprises: (a) a Cas9 polypeptide; and (b) a heterologous amino acid or heterologous polypeptide inserted internally within the Cas9 polypeptide, wherein the heterologous amino acid or heterologous polypeptide is inserted at a position that is immediately adjacent and N-terminal to amino acid 1153 of the Cas9 protein set forth in SEQ ID NO:5, or a corresponding amino acid residue in another Cas9 polypeptide; and wherein the Cas9 fusion polypeptide retains cleavage and/or binding activity relative to the activity of the Cas9 polypeptide without the inserted heterologous amino acid or heterologous polypeptide. In some cases, the heterologous amino acid or heterologous polypeptide is inserted between residues 1152-1153, or between residues 1153-1154, of the Cas9 protein set forth in SEQ ID NO:5, or a corresponding amino acid residue in another Cas9 polypeptide.

[0156] In some cases, a Cas9 fusion polypeptide of the present disclosure comprises: (a) a Cas9 polypeptide; and (b) a heterologous amino acid or heterologous polypeptide inserted internally within the Cas9 polypeptide, wherein the heterologous amino acid or heterologous polypeptide is inserted at a position that is immediately adjacent and C-terminal to amino acid 1155 of the Cas9 protein set forth in SEQ ID NO:5, or a corresponding amino acid residue in another Cas9 polypeptide; and wherein the Cas9 fusion polypeptide retains cleavage and/or binding activity relative to the activity of the Cas9 polypeptide without the inserted heterologous amino acid or heterologous polypeptide. In some cases, a Cas9 fusion polypeptide of the present disclosure comprises: (a) a Cas9 polypeptide; and (b) a heterologous amino acid or heterologous polypeptide inserted internally within the Cas9 polypeptide, wherein the heterologous amino acid or heterologous polypeptide is inserted at a position that is immediately adjacent and N-terminal to amino acid 1155 of the Cas9 protein set forth in SEQ ID NO:5, or a corresponding amino acid residue in another Cas9 polypeptide; and wherein the Cas9 fusion polypeptide retains cleavage and/or binding activity relative to the activity of the Cas9 polypeptide without the inserted heterologous amino acid or heterologous polypeptide. In some cases, the heterologous amino acid or heterologous polypeptide is inserted between residues 1154-1155, or between residues 1155-1156, of the Cas9 protein set forth in SEQ ID NO:5, or a corresponding amino acid residue in another Cas9 polypeptide.

[0157] In some cases, a Cas9 fusion polypeptide of the present disclosure comprises: (a) a Cas9 polypeptide; and (b) a heterologous amino acid or heterologous polypeptide inserted internally within the Cas9 polypeptide, wherein the heterologous amino acid or heterologous polypeptide is inserted at a position that is immediately adjacent and C-terminal to amino acid 1156 of the Cas9 protein set forth in SEQ ID NO:5, or a corresponding amino acid residue in another Cas9 polypeptide; and wherein the Cas9 fusion polypeptide retains cleavage and/or binding activity relative to the activity of the Cas9 polypeptide without the inserted heterologous amino acid or heterologous polypeptide. In some cases, a Cas9 fusion polypeptide of the present disclosure comprises: (a) a Cas9 polypeptide; and (b) a heterologous amino acid or heterologous polypeptide inserted internally within the Cas9 polypeptide, wherein the heterologous amino acid or heterologous polypeptide is inserted at a position that is immediately adjacent and N-terminal to amino acid 1156 of the Cas9 protein set forth in SEQ ID NO:5, or a corresponding amino acid residue in another Cas9 polypeptide; and wherein the Cas9 fusion polypeptide retains cleavage and/or binding activity relative to the activity of the Cas9 polypeptide without the inserted heterologous amino acid or heterologous polypeptide. In some cases, the heterologous amino acid or heterologous polypeptide is inserted between residues 1155-1156, or between residues 1156-1157, of the Cas9 protein set forth in SEQ ID NO:5, or a corresponding amino acid residue in another Cas9 polypeptide.

[0158] In some cases, a Cas9 fusion polypeptide of the present disclosure comprises: (a) a Cas9 polypeptide; and (b) a heterologous amino acid or heterologous polypeptide inserted internally within the Cas9 polypeptide, wherein the heterologous amino acid or heterologous polypeptide is inserted at a position that is immediately adjacent and C-terminal to amino acid 1160 of the Cas9 protein set forth in SEQ ID NO:5, or a corresponding amino acid residue in another Cas9 polypeptide; and wherein the Cas9 fusion polypeptide retains cleavage and/or binding activity relative to the activity of the Cas9 polypeptide without the inserted heterologous amino acid or heterologous polypeptide. In some cases, a Cas9 fusion polypeptide of the present disclosure comprises: (a) a Cas9 polypeptide; and (b) a heterologous amino acid or heterologous polypeptide inserted internally within the Cas9 polypeptide, wherein the heterologous amino acid or heterologous polypeptide is inserted at a position that is immediately adjacent and N-terminal to amino acid 1160 of the Cas9 protein set forth in SEQ ID NO:5, or a corresponding amino acid residue in another Cas9 polypeptide; and wherein the Cas9 fusion polypeptide retains cleavage and/or binding activity relative to the activity of the Cas9 polypeptide without the inserted heterologous amino acid or heterologous polypeptide. In some cases, the heterologous amino acid or heterologous polypeptide is inserted between residues 1159-1160, or between residues 1160-1161, of the Cas9 protein set forth in SEQ ID NO:5, or a corresponding amino acid residue in another Cas9 polypeptide.

[0159] In some cases, a Cas9 fusion polypeptide of the present disclosure comprises: (a) a Cas9 polypeptide; and (b) a heterologous amino acid or heterologous polypeptide inserted internally within the Cas9 polypeptide, wherein the heterologous amino acid or heterologous polypeptide is inserted at a position that is immediately adjacent and C-terminal to amino acid 1161 of the Cas9 protein set forth in SEQ ID NO:5, or a corresponding amino acid residue in another Cas9 polypeptide; and wherein the Cas9 fusion polypeptide retains cleavage and/or binding activity relative to the activity of the Cas9 polypeptide without the inserted heterologous amino acid or heterologous polypeptide. In some cases, a Cas9 fusion polypeptide of the present disclosure comprises: (a) a Cas9 polypeptide; and (b) a heterologous amino acid or heterologous polypeptide inserted internally within the Cas9 polypeptide, wherein the heterologous amino acid or heterologous polypeptide is inserted at a position that is immediately adjacent and N-terminal to amino acid 1161 of the Cas9 protein set forth in SEQ ID NO:5, or a corresponding amino acid residue in another Cas9 polypeptide; and wherein the Cas9 fusion polypeptide retains cleavage and/or binding activity relative to the activity of the Cas9 polypeptide without the inserted heterologous amino acid or heterologous polypeptide. In some cases, the heterologous amino acid or heterologous polypeptide is inserted between residues 1160-1161, or between residues 1161-1162, of the Cas9 protein set forth in SEQ ID NO:5, or a corresponding amino acid residue in another Cas9 polypeptide.

[0160] In some cases, a Cas9 fusion polypeptide of the present disclosure comprises: (a) a Cas9 polypeptide; and (b) a heterologous amino acid or heterologous polypeptide inserted internally within the Cas9 polypeptide, wherein the heterologous amino acid or heterologous polypeptide is inserted at a position that is immediately adjacent and C-terminal to amino acid 1175 of the Cas9 protein set forth in SEQ ID NO:5, or a corresponding amino acid residue in another Cas9 polypeptide; and wherein the Cas9 fusion polypeptide retains cleavage and/or binding activity relative to the activity of the Cas9 polypeptide without the inserted heterologous amino acid or heterologous polypeptide. In some cases, a Cas9 fusion polypeptide of the present disclosure comprises: (a) a Cas9 polypeptide; and (b) a heterologous amino acid or heterologous polypeptide inserted internally within the Cas9 polypeptide, wherein the heterologous amino acid or heterologous polypeptide is inserted at a position that is immediately adjacent and N-terminal to amino acid 1175 of the Cas9 protein set forth in SEQ ID NO:5, or a corresponding amino acid residue in another Cas9 polypeptide; and wherein the Cas9 fusion polypeptide retains cleavage and/or binding activity relative to the activity of the Cas9 polypeptide without the inserted heterologous amino acid or heterologous polypeptide. In some cases, the heterologous amino acid or heterologous polypeptide is inserted between residues 1174-1175, or between residues 1175-1176, of the Cas9 protein set forth in SEQ ID NO:5, or a corresponding amino acid residue in another Cas9 polypeptide.

[0161] In some cases, a Cas9 fusion polypeptide of the present disclosure comprises: (a) a Cas9 polypeptide; and (b) a heterologous amino acid or heterologous polypeptide inserted internally within the Cas9 polypeptide, wherein the heterologous amino acid or heterologous polypeptide is inserted at a position that is immediately adjacent and C-terminal to amino acid 1179 of the Cas9 protein set forth in SEQ ID NO:5, or a corresponding amino acid residue in another Cas9 polypeptide; and wherein the Cas9 fusion polypeptide retains cleavage and/or binding activity relative to the activity of the Cas9 polypeptide without the inserted heterologous amino acid or heterologous polypeptide. In some cases, a Cas9 fusion polypeptide of the present disclosure comprises: (a) a Cas9 polypeptide; and (b) a heterologous amino acid or heterologous polypeptide inserted internally within the Cas9 polypeptide, wherein the heterologous amino acid or heterologous polypeptide is inserted at a position that is immediately adjacent and N-terminal to amino acid 1179 of the Cas9 protein set forth in SEQ ID NO:5, or a corresponding amino acid residue in another Cas9 polypeptide; and wherein the Cas9 fusion polypeptide retains cleavage and/or binding activity relative to the activity of the Cas9 polypeptide without the inserted heterologous amino acid or heterologous polypeptide. In some cases, the heterologous amino acid or heterologous polypeptide is inserted between residues 1178-1179, or between residues 1179-1180, of the Cas9 protein set forth in SEQ ID NO:5, or a corresponding amino acid residue in another Cas9 polypeptide.

[0162] In some cases, a Cas9 fusion polypeptide of the present disclosure comprises: (a) a Cas9 polypeptide; and (b) a heterologous amino acid or heterologous polypeptide inserted internally within the Cas9 polypeptide, wherein the heterologous amino acid or heterologous polypeptide is inserted at a position that is immediately adjacent and C-terminal to amino acid 1183 of the Cas9 protein set forth in SEQ ID NO:5, or a corresponding amino acid residue in another Cas9 polypeptide; and wherein the Cas9 fusion polypeptide retains cleavage and/or binding activity relative to the activity of the Cas9 polypeptide without the inserted heterologous amino acid or heterologous polypeptide. In some cases, a Cas9 fusion polypeptide of the present disclosure comprises: (a) a Cas9 polypeptide; and (b) a heterologous amino acid or heterologous polypeptide inserted internally within the Cas9 polypeptide, wherein the heterologous amino acid or heterologous polypeptide is inserted at a position that is immediately adjacent and N-terminal to amino acid 1183 of the Cas9 protein set forth in SEQ ID NO:5, or a corresponding amino acid residue in another Cas9 polypeptide; and wherein the Cas9 fusion polypeptide retains cleavage and/or binding activity relative to the activity of the Cas9 polypeptide without the inserted heterologous amino acid or heterologous polypeptide. In some cases, the heterologous amino acid or heterologous polypeptide is inserted between residues 1182-1183, or between residues 1183-1184, of the Cas9 protein set forth in SEQ ID NO:5, or a corresponding amino acid residue in another Cas9 polypeptide.

[0163] In some cases, a Cas9 fusion polypeptide of the present disclosure comprises: (a) a Cas9 polypeptide; and (b) a heterologous amino acid or heterologous polypeptide inserted internally within the Cas9 polypeptide, wherein the heterologous amino acid or heterologous polypeptide is inserted at a position that is immediately adjacent and C-terminal to amino acid 1186 of the Cas9 protein set forth in SEQ ID NO:5, or a corresponding amino acid residue in another Cas9 polypeptide; and wherein the Cas9 fusion polypeptide retains cleavage and/or binding activity relative to the activity of the Cas9 polypeptide without the inserted heterologous amino acid or heterologous polypeptide. In some cases, a Cas9 fusion polypeptide of the present disclosure comprises: (a) a Cas9 polypeptide; and (b) a heterologous amino acid or heterologous polypeptide inserted internally within the Cas9 polypeptide, wherein the heterologous amino acid or heterologous polypeptide is inserted at a position that is immediately adjacent and N-terminal to amino acid 1186 of the Cas9 protein set forth in SEQ ID NO:5, or a corresponding amino acid residue in another Cas9 polypeptide; and wherein the Cas9 fusion polypeptide retains cleavage and/or binding activity relative to the activity of the Cas9 polypeptide without the inserted heterologous amino acid or heterologous polypeptide. In some cases, the heterologous amino acid or heterologous polypeptide is inserted between residues 1185-1186, or between residues 1186-1187, of the Cas9 protein set forth in SEQ ID NO:5, or a corresponding amino acid residue in another Cas9 polypeptide.

[0164] In some cases, a Cas9 fusion polypeptide of the present disclosure comprises: (a) a Cas9 polypeptide; and (b) a heterologous amino acid or heterologous polypeptide inserted internally within the Cas9 polypeptide, wherein the heterologous amino acid or heterologous polypeptide is inserted at a position that is immediately adjacent and C-terminal to amino acid 1188 of the Cas9 protein set forth in SEQ ID NO:5, or a corresponding amino acid residue in another Cas9 polypeptide; and wherein the Cas9 fusion polypeptide retains cleavage and/or binding activity relative to the activity of the Cas9 polypeptide without the inserted heterologous amino acid or heterologous polypeptide. In some cases, a Cas9 fusion polypeptide of the present disclosure comprises: (a) a Cas9 polypeptide; and (b) a heterologous amino acid or heterologous polypeptide inserted internally within the Cas9 polypeptide, wherein the heterologous amino acid or heterologous polypeptide is inserted at a position that is immediately adjacent and N-terminal to amino acid 1188 of the Cas9 protein set forth in SEQ ID NO:5, or a corresponding amino acid residue in another Cas9 polypeptide; and wherein the Cas9 fusion polypeptide retains cleavage and/or binding activity relative to the activity of the Cas9 polypeptide without the inserted heterologous amino acid or heterologous polypeptide. In some cases, the heterologous amino acid or heterologous polypeptide is inserted between residues 1187-1188, or between residues 1188-1189, of the Cas9 protein set forth in SEQ ID NO:5, or a corresponding amino acid residue in another Cas9 polypeptide.

[0165] In some cases, a Cas9 fusion polypeptide of the present disclosure comprises: (a) a Cas9 polypeptide; and (b) a heterologous amino acid or heterologous polypeptide inserted internally within the Cas9 polypeptide, wherein the heterologous amino acid or heterologous polypeptide is inserted at a position that is immediately adjacent and C-terminal to amino acid 1189 of the Cas9 protein set forth in SEQ ID NO:5, or a corresponding amino acid residue in another Cas9 polypeptide; and wherein the Cas9 fusion polypeptide retains cleavage and/or binding activity relative to the activity of the Cas9 polypeptide without the inserted heterologous amino acid or heterologous polypeptide. In some cases, a Cas9 fusion polypeptide of the present disclosure comprises: (a) a Cas9 polypeptide; and (b) a heterologous amino acid or heterologous polypeptide inserted internally within the Cas9 polypeptide, wherein the heterologous amino acid or heterologous polypeptide is inserted at a position that is immediately adjacent and N-terminal to amino acid 1189 of the Cas9 protein set forth in SEQ ID NO:5, or a corresponding amino acid residue in another Cas9 polypeptide; and wherein the Cas9 fusion polypeptide retains cleavage and/or binding activity relative to the activity of the Cas9 polypeptide without the inserted heterologous amino acid or heterologous polypeptide. In some cases, the heterologous amino acid or heterologous polypeptide is inserted between residues 1188-1189, or between residues 1189-1190, of the Cas9 protein set forth in SEQ ID NO:5, or a corresponding amino acid residue in another Cas9 polypeptide.

[0166] In some cases, a Cas9 fusion polypeptide of the present disclosure comprises: (a) a Cas9 polypeptide; and (b) a heterologous amino acid or heterologous polypeptide inserted internally within the Cas9 polypeptide, wherein the heterologous amino acid or heterologous polypeptide is inserted at a position that is immediately adjacent and C-terminal to amino acid 1190 of the Cas9 protein set forth in SEQ ID NO:5, or a corresponding amino acid residue in another Cas9 polypeptide; and wherein the Cas9 fusion polypeptide retains cleavage and/or binding activity relative to the activity of the Cas9 polypeptide without the inserted heterologous amino acid or heterologous polypeptide. In some cases, a Cas9 fusion polypeptide of the present disclosure comprises: (a) a Cas9 polypeptide; and (b) a heterologous amino acid or heterologous polypeptide inserted internally within the Cas9 polypeptide, wherein the heterologous amino acid or heterologous polypeptide is inserted at a position that is immediately adjacent and N-terminal to amino acid 1190 of the Cas9 protein set forth in SEQ ID NO:5, or a corresponding amino acid residue in another Cas9 polypeptide; and wherein the Cas9 fusion polypeptide retains cleavage and/or binding activity relative to the activity of the Cas9 polypeptide without the inserted heterologous amino acid or heterologous polypeptide. In some cases, the heterologous amino acid or heterologous polypeptide is inserted between residues 1189-1190, or between residues 1190-1191, of the Cas9 protein set forth in SEQ ID NO:5, or a corresponding amino acid residue in another Cas9 polypeptide.

[0167] In some cases, a Cas9 fusion polypeptide of the present disclosure comprises: (a) a Cas9 polypeptide; and (b) a heterologous amino acid or heterologous polypeptide inserted internally within the Cas9 polypeptide, wherein the heterologous amino acid or heterologous polypeptide is inserted at a position that is immediately adjacent and C-terminal to amino acid 1191 of the Cas9 protein set forth in SEQ ID NO:5, or a corresponding amino acid residue in another Cas9 polypeptide; and wherein the Cas9 fusion polypeptide retains cleavage and/or binding activity relative to the activity of the Cas9 polypeptide without the inserted heterologous amino acid or heterologous polypeptide. In some cases, a Cas9 fusion polypeptide of the present disclosure comprises: (a) a Cas9 polypeptide; and (b) a heterologous amino acid or heterologous polypeptide inserted internally within the Cas9 polypeptide, wherein the heterologous amino acid or heterologous polypeptide is inserted at a position that is immediately adjacent and N-terminal to amino acid 1191 of the Cas9 protein set forth in SEQ ID NO:5, or a corresponding amino acid residue in another Cas9 polypeptide; and wherein the Cas9 fusion polypeptide retains cleavage and/or binding activity relative to the activity of the Cas9 polypeptide without the inserted heterologous amino acid or heterologous polypeptide. In some cases, the heterologous amino acid or heterologous polypeptide is inserted between residues 1190-1191, or between residues 1191-1192, of the Cas9 protein set forth in SEQ ID NO:5, or a corresponding amino acid residue in another Cas9 polypeptide.

[0168] In some cases, a Cas9 fusion polypeptide of the present disclosure comprises: (a) a Cas9 polypeptide; and (b) a heterologous amino acid or heterologous polypeptide inserted internally within the Cas9 polypeptide, wherein the heterologous amino acid or heterologous polypeptide is inserted at a position that is immediately adjacent and C-terminal to amino acid 1193 of the Cas9 protein set forth in SEQ ID NO:5, or a corresponding amino acid residue in another Cas9 polypeptide; and wherein the Cas9 fusion polypeptide retains cleavage and/or binding activity relative to the activity of the Cas9 polypeptide without the inserted heterologous amino acid or heterologous polypeptide. In some cases, a Cas9 fusion polypeptide of the present disclosure comprises: (a) a Cas9 polypeptide; and (b) a heterologous amino acid or heterologous polypeptide inserted internally within the Cas9 polypeptide, wherein the heterologous amino acid or heterologous polypeptide is inserted at a position that is immediately adjacent and N-terminal to amino acid 1193 of the Cas9 protein set forth in SEQ ID NO:5, or a corresponding amino acid residue in another Cas9 polypeptide; and wherein the Cas9 fusion polypeptide retains cleavage and/or binding activity relative to the activity of the Cas9 polypeptide without the inserted heterologous amino acid or heterologous polypeptide. In some cases, the heterologous amino acid or heterologous polypeptide is inserted between residues 1192-1193, or between residues 1193-1194, of the Cas9 protein set forth in SEQ ID NO:5, or a corresponding amino acid residue in another Cas9 polypeptide.

[0169] In some cases, a Cas9 fusion polypeptide of the present disclosure comprises: (a) a Cas9 polypeptide; and (b) a heterologous amino acid or heterologous polypeptide inserted internally within the Cas9 polypeptide, wherein the heterologous amino acid or heterologous polypeptide is inserted at a position that is immediately adjacent and C-terminal to amino acid 1194 of the Cas9 protein set forth in SEQ ID NO:5, or a corresponding amino acid residue in another Cas9 polypeptide; and wherein the Cas9 fusion polypeptide retains cleavage and/or binding activity relative to the activity of the Cas9 polypeptide without the inserted heterologous amino acid or heterologous polypeptide. In some cases, a Cas9 fusion polypeptide of the present disclosure comprises: (a) a Cas9 polypeptide; and (b) a heterologous amino acid or heterologous polypeptide inserted internally within the Cas9 polypeptide, wherein the heterologous amino acid or heterologous polypeptide is inserted at a position that is immediately adjacent and N-terminal to amino acid 1194 of the Cas9 protein set forth in SEQ ID NO:5, or a corresponding amino acid residue in another Cas9 polypeptide; and wherein the Cas9 fusion polypeptide retains cleavage and/or binding activity relative to the activity of the Cas9 polypeptide without the inserted heterologous amino acid or heterologous polypeptide. In some cases, the heterologous amino acid or heterologous polypeptide is inserted between residues 1193-1194, or between residues 1194-1195, of the Cas9 protein set forth in SEQ ID NO:5, or a corresponding amino acid residue in another Cas9 polypeptide.

[0170] In some cases, a Cas9 fusion polypeptide of the present disclosure comprises: (a) a Cas9 polypeptide; and (b) a heterologous amino acid or heterologous polypeptide inserted internally within the Cas9 polypeptide, wherein the heterologous amino acid or heterologous polypeptide is inserted at a position that is immediately adjacent and C-terminal to amino acid 1195 of the Cas9 protein set forth in SEQ ID NO:5, or a corresponding amino acid residue in another Cas9 polypeptide; and wherein the Cas9 fusion polypeptide retains cleavage and/or binding activity relative to the activity of the Cas9 polypeptide without the inserted heterologous amino acid or heterologous polypeptide. In some cases, a Cas9 fusion polypeptide of the present disclosure comprises: (a) a Cas9 polypeptide; and (b) a heterologous amino acid or heterologous polypeptide inserted internally within the Cas9 polypeptide, wherein the heterologous amino acid or heterologous polypeptide is inserted at a position that is immediately adjacent and N-terminal to amino acid 1195 of the Cas9 protein set forth in SEQ ID NO:5, or a corresponding amino acid residue in another Cas9 polypeptide; and wherein the Cas9 fusion polypeptide retains cleavage and/or binding activity relative to the activity of the Cas9 polypeptide without the inserted heterologous amino acid or heterologous polypeptide. In some cases, the heterologous amino acid or heterologous polypeptide is inserted between residues 1194-1195, or between residues 1195-1196, of the Cas9 protein set forth in SEQ ID NO:5, or a corresponding amino acid residue in another Cas9 polypeptide.

[0171] In some cases, a Cas9 fusion polypeptide of the present disclosure comprises: (a) a Cas9 polypeptide; and (b) a heterologous amino acid or heterologous polypeptide inserted internally within the Cas9 polypeptide, wherein the heterologous amino acid or heterologous polypeptide is inserted at a position that is immediately adjacent and C-terminal to amino acid 1196 of the Cas9 protein set forth in SEQ ID NO:5, or a corresponding amino acid residue in another Cas9 polypeptide; and wherein the Cas9 fusion polypeptide retains cleavage and/or binding activity relative to the activity of the Cas9 polypeptide without the inserted heterologous amino acid or heterologous polypeptide. In some cases, a Cas9 fusion polypeptide of the present disclosure comprises: (a) a Cas9 polypeptide; and (b) a heterologous amino acid or heterologous polypeptide inserted internally within the Cas9 polypeptide, wherein the heterologous amino acid or heterologous polypeptide is inserted at a position that is immediately adjacent and N-terminal to amino acid 1196 of the Cas9 protein set forth in SEQ ID NO:5, or a corresponding amino acid residue in another Cas9 polypeptide; and wherein the Cas9 fusion polypeptide retains cleavage and/or binding activity relative to the activity of the Cas9 polypeptide without the inserted heterologous amino acid or heterologous polypeptide. In some cases, the heterologous amino acid or heterologous polypeptide is inserted between residues 1195-1196, or between residues 1196-1197, of the Cas9 protein set forth in SEQ ID NO:5, or a corresponding amino acid residue in another Cas9 polypeptide.

[0172] In some cases, a Cas9 fusion polypeptide of the present disclosure comprises: (a) a Cas9 polypeptide; and (b) a heterologous amino acid or heterologous polypeptide inserted internally within the Cas9 polypeptide, wherein the heterologous amino acid or heterologous polypeptide is inserted at a position that is immediately adjacent and C-terminal to amino acid 1197 of the Cas9 protein set forth in SEQ ID NO:5, or a corresponding amino acid residue in another Cas9 polypeptide; and wherein the Cas9 fusion polypeptide retains cleavage and/or binding activity relative to the activity of the Cas9 polypeptide without the inserted heterologous amino acid or heterologous polypeptide. In some cases, a Cas9 fusion polypeptide of the present disclosure comprises: (a) a Cas9 polypeptide; and (b) a heterologous amino acid or heterologous polypeptide inserted internally within the Cas9 polypeptide, wherein the heterologous amino acid or heterologous polypeptide is inserted at a position that is immediately adjacent and N-terminal to amino acid 1197 of the Cas9 protein set forth in SEQ ID NO:5, or a corresponding amino acid residue in another Cas9 polypeptide; and wherein the Cas9 fusion polypeptide retains cleavage and/or binding activity relative to the activity of the Cas9 polypeptide without the inserted heterologous amino acid or heterologous polypeptide. In some cases, the heterologous amino acid or heterologous polypeptide is inserted between residues 1196-1197, or between residues 1197-1198, of the Cas9 protein set forth in SEQ ID NO:5, or a corresponding amino acid residue in another Cas9 polypeptide.

[0173] In some cases, a Cas9 fusion polypeptide of the present disclosure comprises: (a) a Cas9 polypeptide; and (b) a heterologous amino acid or heterologous polypeptide inserted internally within the Cas9 polypeptide, wherein the heterologous amino acid or heterologous polypeptide is inserted at a position that is immediately adjacent and C-terminal to amino acid 1204 of the Cas9 protein set forth in SEQ ID NO:5, or a corresponding amino acid residue in another Cas9 polypeptide; and wherein the Cas9 fusion polypeptide retains cleavage and/or binding activity relative to the activity of the Cas9 polypeptide without the inserted heterologous amino acid or heterologous polypeptide. In some cases, a Cas9 fusion polypeptide of the present disclosure comprises: (a) a Cas9 polypeptide; and (b) a heterologous amino acid or heterologous polypeptide inserted internally within the Cas9 polypeptide, wherein the heterologous amino acid or heterologous polypeptide is inserted at a position that is immediately adjacent and N-terminal to amino acid 1204 of the Cas9 protein set forth in SEQ ID NO:5, or a corresponding amino acid residue in another Cas9 polypeptide; and wherein the Cas9 fusion polypeptide retains cleavage and/or binding activity relative to the activity of the Cas9 polypeptide without the inserted heterologous amino acid or heterologous polypeptide. In some cases, the heterologous amino acid or heterologous polypeptide is inserted between residues 1203-1204, or between residues 1204-1205, of the Cas9 protein set forth in SEQ ID NO:5, or a corresponding amino acid residue in another Cas9 polypeptide.

[0174] In some cases, a Cas9 fusion polypeptide of the present disclosure comprises: (a) a Cas9 polypeptide; and (b) a heterologous amino acid or heterologous polypeptide inserted internally within the Cas9 polypeptide, wherein the heterologous amino acid or heterologous polypeptide is inserted at a position that is immediately adjacent and C-terminal to amino acid 1205 of the Cas9 protein set forth in SEQ ID NO:5, or a corresponding amino acid residue in another Cas9 polypeptide; and wherein the Cas9 fusion polypeptide retains cleavage and/or binding activity relative to the activity of the Cas9 polypeptide without the inserted heterologous amino acid or heterologous polypeptide. In some cases, a Cas9 fusion polypeptide of the present disclosure comprises: (a) a Cas9 polypeptide; and (b) a heterologous amino acid or heterologous polypeptide inserted internally within the Cas9 polypeptide, wherein the heterologous amino acid or heterologous polypeptide is inserted at a position that is immediately adjacent and N-terminal to amino acid 1205 of the Cas9 protein set forth in SEQ ID NO:5, or a corresponding amino acid residue in another Cas9 polypeptide; and wherein the Cas9 fusion polypeptide retains cleavage and/or binding activity relative to the activity of the Cas9 polypeptide without the inserted heterologous amino acid or heterologous polypeptide. In some cases, the heterologous amino acid or heterologous polypeptide is inserted between residues 1204-1205, or between residues 1205-1206, of the Cas9 protein set forth in SEQ ID NO:5, or a corresponding amino acid residue in another Cas9 polypeptide.

[0175] In some cases, a Cas9 fusion polypeptide of the present disclosure comprises: (a) a Cas9 polypeptide; and (b) a heterologous amino acid or heterologous polypeptide inserted internally within the Cas9 polypeptide, wherein the heterologous amino acid or heterologous polypeptide is inserted at a position that is immediately adjacent and C-terminal to amino acid 1206 of the Cas9 protein set forth in SEQ ID NO:5, or a corresponding amino acid residue in another Cas9 polypeptide; and wherein the Cas9 fusion polypeptide retains cleavage and/or binding activity relative to the activity of the Cas9 polypeptide without the inserted heterologous amino acid or heterologous polypeptide. In some cases, a Cas9 fusion polypeptide of the present disclosure comprises: (a) a Cas9 polypeptide; and (b) a heterologous amino acid or heterologous polypeptide inserted internally within the Cas9 polypeptide, wherein the heterologous amino acid or heterologous polypeptide is inserted at a position that is immediately adjacent and N-terminal to amino acid 1206 of the Cas9 protein set forth in SEQ ID NO:5, or a corresponding amino acid residue in another Cas9 polypeptide; and wherein the Cas9 fusion polypeptide retains cleavage and/or binding activity relative to the activity of the Cas9 polypeptide without the inserted heterologous amino acid or heterologous polypeptide. In some cases, the heterologous amino acid or heterologous polypeptide is inserted between residues 1205-1206, or between residues 1206-1207, of the Cas9 protein set forth in SEQ ID NO:5, or a corresponding amino acid residue in another Cas9 polypeptide.

[0176] In some cases, a Cas9 fusion polypeptide of the present disclosure comprises: (a) a Cas9 polypeptide; and (b) a heterologous amino acid or heterologous polypeptide inserted internally within the Cas9 polypeptide, wherein the heterologous amino acid or heterologous polypeptide is inserted at a position that is immediately adjacent and C-terminal to amino acid 1207 of the Cas9 protein set forth in SEQ ID NO:5, or a corresponding amino acid residue in another Cas9 polypeptide; and wherein the Cas9 fusion polypeptide retains cleavage and/or binding activity relative to the activity of the Cas9 polypeptide without the inserted heterologous amino acid or heterologous polypeptide. In some cases, a Cas9 fusion polypeptide of the present disclosure comprises: (a) a Cas9 polypeptide; and (b) a heterologous amino acid or heterologous polypeptide inserted internally within the Cas9 polypeptide, wherein the heterologous amino acid or heterologous polypeptide is inserted at a position that is immediately adjacent and N-terminal to amino acid 1207 of the Cas9 protein set forth in SEQ ID NO:5, or a corresponding amino acid residue in another Cas9 polypeptide; and wherein the Cas9 fusion polypeptide retains cleavage and/or binding activity relative to the activity of the Cas9 polypeptide without the inserted heterologous amino acid or heterologous polypeptide. In some cases, the heterologous amino acid or heterologous polypeptide is inserted between residues 1206-1207, or between residues 1207-1208, of the Cas9 protein set forth in SEQ ID NO:5, or a corresponding amino acid residue in another Cas9 polypeptide.

[0177] In some cases, a Cas9 fusion polypeptide of the present disclosure comprises: (a) a Cas9 polypeptide; and (b) a heterologous amino acid or heterologous polypeptide inserted internally within the Cas9 polypeptide, wherein the heterologous amino acid or heterologous polypeptide is inserted at a position that is immediately adjacent and C-terminal to amino acid 1212 of the Cas9 protein set forth in SEQ ID NO:5, or a corresponding amino acid residue in another Cas9 polypeptide; and wherein the Cas9 fusion polypeptide retains cleavage and/or binding activity relative to the activity of the Cas9 polypeptide without the inserted heterologous amino acid or heterologous polypeptide. In some cases, a Cas9 fusion polypeptide of the present disclosure comprises: (a) a Cas9 polypeptide; and (b) a heterologous amino acid or heterologous polypeptide inserted internally within the Cas9 polypeptide, wherein the heterologous amino acid or heterologous polypeptide is inserted at a position that is immediately adjacent and N-terminal to amino acid 1212 of the Cas9 protein set forth in SEQ ID NO:5, or a corresponding amino acid residue in another Cas9 polypeptide; and wherein the Cas9 fusion polypeptide retains cleavage and/or binding activity relative to the activity of the Cas9 polypeptide without the inserted heterologous amino acid or heterologous polypeptide. In some cases, the heterologous amino acid or heterologous polypeptide is inserted between residues 1211-1212, or between residues 1212-1213, of the Cas9 protein set forth in SEQ ID NO:5, or a corresponding amino acid residue in another Cas9 polypeptide.

[0178] In some cases, a Cas9 fusion polypeptide of the present disclosure comprises: (a) a Cas9 polypeptide; and (b) a heterologous amino acid or heterologous polypeptide inserted internally within the Cas9 polypeptide, wherein the heterologous amino acid or heterologous polypeptide is inserted at a position that is immediately adjacent and C-terminal to amino acid 1213 of the Cas9 protein set forth in SEQ ID NO:5, or a corresponding amino acid residue in another Cas9 polypeptide; and wherein the Cas9 fusion polypeptide retains cleavage and/or binding activity relative to the activity of the Cas9 polypeptide without the inserted heterologous amino acid or heterologous polypeptide. In some cases, a Cas9 fusion polypeptide of the present disclosure comprises: (a) a Cas9 polypeptide; and (b) a heterologous amino acid or heterologous polypeptide inserted internally within the Cas9 polypeptide, wherein the heterologous amino acid or heterologous polypeptide is inserted at a position that is immediately adjacent and N-terminal to amino acid 1213 of the Cas9 protein set forth in SEQ ID NO:5, or a corresponding amino acid residue in another Cas9 polypeptide; and wherein the Cas9 fusion polypeptide retains cleavage and/or binding activity relative to the activity of the Cas9 polypeptide without the inserted heterologous amino acid or heterologous polypeptide. In some cases, the heterologous amino acid or heterologous polypeptide is inserted between residues 1212-1213, or between residues 1213-1214, of the Cas9 protein set forth in SEQ ID NO:5, or a corresponding amino acid residue in another Cas9 polypeptide.

[0179] In some cases, a Cas9 fusion polypeptide of the present disclosure comprises: (a) a Cas9 polypeptide; and (b) a heterologous amino acid or heterologous polypeptide inserted internally within the Cas9 polypeptide, wherein the heterologous amino acid or heterologous polypeptide is inserted at a position that is immediately adjacent and C-terminal to amino acid 1228 of the Cas9 protein set forth in SEQ ID NO:5, or a corresponding amino acid residue in another Cas9 polypeptide; and wherein the Cas9 fusion polypeptide retains cleavage and/or binding activity relative to the activity of the Cas9 polypeptide without the inserted heterologous amino acid or heterologous polypeptide. In some cases, a Cas9 fusion polypeptide of the present disclosure comprises: (a) a Cas9 polypeptide; and (b) a heterologous amino acid or heterologous polypeptide inserted internally within the Cas9 polypeptide, wherein the heterologous amino acid or heterologous polypeptide is inserted at a position that is immediately adjacent and N-terminal to amino acid 1228 of the Cas9 protein set forth in SEQ ID NO:5, or a corresponding amino acid residue in another Cas9 polypeptide; and wherein the Cas9 fusion polypeptide retains cleavage and/or binding activity relative to the activity of the Cas9 polypeptide without the inserted heterologous amino acid or heterologous polypeptide. In some cases, the heterologous amino acid or heterologous polypeptide is inserted between residues 1227-1228, or between residues 1228-1229, of the Cas9 protein set forth in SEQ ID NO:5, or a corresponding amino acid residue in another Cas9 polypeptide.

[0180] In some cases, a Cas9 fusion polypeptide of the present disclosure comprises: (a) a Cas9 polypeptide; and (b) a heterologous amino acid or heterologous polypeptide inserted internally within the Cas9 polypeptide, wherein the heterologous amino acid or heterologous polypeptide is inserted at a position that is immediately adjacent and C-terminal to amino acid 1229 of the Cas9 protein set forth in SEQ ID NO:5, or a corresponding amino acid residue in another Cas9 polypeptide; and wherein the Cas9 fusion polypeptide retains cleavage and/or binding activity relative to the activity of the Cas9 polypeptide without the inserted heterologous amino acid or heterologous polypeptide. In some cases, a Cas9 fusion polypeptide of the present disclosure comprises: (a) a Cas9 polypeptide; and (b) a heterologous amino acid or heterologous polypeptide inserted internally within the Cas9 polypeptide, wherein the heterologous amino acid or heterologous polypeptide is inserted at a position that is immediately adjacent and N-terminal to amino acid 1229 of the Cas9 protein set forth in SEQ ID NO:5, or a corresponding amino acid residue in another Cas9 polypeptide; and wherein the Cas9 fusion polypeptide retains cleavage and/or binding activity relative to the activity of the Cas9 polypeptide without the inserted heterologous amino acid or heterologous polypeptide. In some cases, the heterologous amino acid or heterologous polypeptide is inserted between residues 1228-1229, or between residues 1229-1230, of the Cas9 protein set forth in SEQ ID NO:5, or a corresponding amino acid residue in another Cas9 polypeptide.

[0181] In some cases, a Cas9 fusion polypeptide of the present disclosure comprises: (a) a Cas9 polypeptide; and (b) a heterologous amino acid or heterologous polypeptide inserted internally within the Cas9 polypeptide, wherein the heterologous amino acid or heterologous polypeptide is inserted at a position that is immediately adjacent and C-terminal to amino acid 1230 of the Cas9 protein set forth in SEQ ID NO:5, or a corresponding amino acid residue in another Cas9 polypeptide; and wherein the Cas9 fusion polypeptide retains cleavage and/or binding activity relative to the activity of the Cas9 polypeptide without the inserted heterologous amino acid or heterologous polypeptide. In some cases, a Cas9 fusion polypeptide of the present disclosure comprises: (a) a Cas9 polypeptide; and (b) a heterologous amino acid or heterologous polypeptide inserted internally within the Cas9 polypeptide, wherein the heterologous amino acid or heterologous polypeptide is inserted at a position that is immediately adjacent and N-terminal to amino acid 1230 of the Cas9 protein set forth in SEQ ID NO:5, or a corresponding amino acid residue in another Cas9 polypeptide; and wherein the Cas9 fusion polypeptide retains cleavage and/or binding activity relative to the activity of the Cas9 polypeptide without the inserted heterologous amino acid or heterologous polypeptide. In some cases, the heterologous amino acid or heterologous polypeptide is inserted between residues 1229-1230, or between residues 1230-1231, of the Cas9 protein set forth in SEQ ID NO:5, or a corresponding amino acid residue in another Cas9 polypeptide.

[0182] In some cases, a Cas9 fusion polypeptide of the present disclosure comprises: (a) a Cas9 polypeptide; and (b) a heterologous amino acid or heterologous polypeptide inserted internally within the Cas9 polypeptide, wherein the heterologous amino acid or heterologous polypeptide is inserted at a position that is immediately adjacent and C-terminal to amino acid 1233 of the Cas9 protein set forth in SEQ ID NO:5, or a corresponding amino acid residue in another Cas9 polypeptide; and wherein the Cas9 fusion polypeptide retains cleavage and/or binding activity relative to the activity of the Cas9 polypeptide without the inserted heterologous amino acid or heterologous polypeptide. In some cases, a Cas9 fusion polypeptide of the present disclosure comprises: (a) a Cas9 polypeptide; and (b) a heterologous amino acid or heterologous polypeptide inserted internally within the Cas9 polypeptide, wherein the heterologous amino acid or heterologous polypeptide is inserted at a position that is immediately adjacent and N-terminal to amino acid 1233 of the Cas9 protein set forth in SEQ ID NO:5, or a corresponding amino acid residue in another Cas9 polypeptide; and wherein the Cas9 fusion polypeptide retains cleavage and/or binding activity relative to the activity of the Cas9 polypeptide without the inserted heterologous amino acid or heterologous polypeptide. In some cases, the heterologous amino acid or heterologous polypeptide is inserted between residues 1232-1233, or between residues 1233-1234, of the Cas9 protein set forth in SEQ ID NO:5, or a corresponding amino acid residue in another Cas9 polypeptide.

[0183] In some cases, a Cas9 fusion polypeptide of the present disclosure comprises: (a) a Cas9 polypeptide; and (b) a heterologous amino acid or heterologous polypeptide inserted internally within the Cas9 polypeptide, wherein the heterologous amino acid or heterologous polypeptide is inserted at a position that is immediately adjacent and C-terminal to amino acid 1234 of the Cas9 protein set forth in SEQ ID NO:5, or a corresponding amino acid residue in another Cas9 polypeptide; and wherein the Cas9 fusion polypeptide retains cleavage and/or binding activity relative to the activity of the Cas9 polypeptide without the inserted heterologous amino acid or heterologous polypeptide. In some cases, a Cas9 fusion polypeptide of the present disclosure comprises: (a) a Cas9 polypeptide; and (b) a heterologous amino acid or heterologous polypeptide inserted internally within the Cas9 polypeptide, wherein the heterologous amino acid or heterologous polypeptide is inserted at a position that is immediately adjacent and N-terminal to amino acid 1234 of the Cas9 protein set forth in SEQ ID NO:5, or a corresponding amino acid residue in another Cas9 polypeptide; and wherein the Cas9 fusion polypeptide retains cleavage and/or binding activity relative to the activity of the Cas9 polypeptide without the inserted heterologous amino acid or heterologous polypeptide. In some cases, the heterologous amino acid or heterologous polypeptide is inserted between residues 1234-1235, or between residues 1235-1236, of the Cas9 protein set forth in SEQ ID NO:5, or a corresponding amino acid residue in another Cas9 polypeptide.

[0184] In some cases, a Cas9 fusion polypeptide of the present disclosure comprises: (a) a Cas9 polypeptide; and (b) a heterologous amino acid or heterologous polypeptide inserted internally within the Cas9 polypeptide, wherein the heterologous amino acid or heterologous polypeptide is inserted at a position that is immediately adjacent and C-terminal to amino acid 1237 of the Cas9 protein set forth in SEQ ID NO:5, or a corresponding amino acid residue in another Cas9 polypeptide; and wherein the Cas9 fusion polypeptide retains cleavage and/or binding activity relative to the activity of the Cas9 polypeptide without the inserted heterologous amino acid or heterologous polypeptide. In some cases, a Cas9 fusion polypeptide of the present disclosure comprises: (a) a Cas9 polypeptide; and (b) a heterologous amino acid or heterologous polypeptide inserted internally within the Cas9 polypeptide, wherein the heterologous amino acid or heterologous polypeptide is inserted at a position that is immediately adjacent and N-terminal to amino acid 1237 of the Cas9 protein set forth in SEQ ID NO:5, or a corresponding amino acid residue in another Cas9 polypeptide; and wherein the Cas9 fusion polypeptide retains cleavage and/or binding activity relative to the activity of the Cas9 polypeptide without the inserted heterologous amino acid or heterologous polypeptide. In some cases, the heterologous amino acid or heterologous polypeptide is inserted between residues 1236-1237, or between residues 1237-1238, of the Cas9 protein set forth in SEQ ID NO:5, or a corresponding amino acid residue in another Cas9 polypeptide.

[0185] In some cases, a Cas9 fusion polypeptide of the present disclosure comprises: (a) a Cas9 polypeptide; and (b) a heterologous amino acid or heterologous polypeptide inserted internally within the Cas9 polypeptide, wherein the heterologous amino acid or heterologous polypeptide is inserted at a position that is immediately adjacent and C-terminal to amino acid 1238 of the Cas9 protein set forth in SEQ ID NO:5, or a corresponding amino acid residue in another Cas9 polypeptide; and wherein the Cas9 fusion polypeptide retains cleavage and/or binding activity relative to the activity of the Cas9 polypeptide without the inserted heterologous amino acid or heterologous polypeptide. In some cases, a Cas9 fusion polypeptide of the present disclosure comprises: (a) a Cas9 polypeptide; and (b) a heterologous amino acid or heterologous polypeptide inserted internally within the Cas9 polypeptide, wherein the heterologous amino acid or heterologous polypeptide is inserted at a position that is immediately adjacent and N-terminal to amino acid 1238 of the Cas9 protein set forth in SEQ ID NO:5, or a corresponding amino acid residue in another Cas9 polypeptide; and wherein the Cas9 fusion polypeptide retains cleavage and/or binding activity relative to the activity of the Cas9 polypeptide without the inserted heterologous amino acid or heterologous polypeptide. In some cases, the heterologous amino acid or heterologous polypeptide is inserted between residues 1237-1238, or between residues 1238-1239, of the Cas9 protein set forth in SEQ ID NO:5, or a corresponding amino acid residue in another Cas9 polypeptide.

[0186] In some cases, a Cas9 fusion polypeptide of the present disclosure comprises: (a) a Cas9 polypeptide; and (b) a heterologous amino acid or heterologous polypeptide inserted internally within the Cas9 polypeptide, wherein the heterologous amino acid or heterologous polypeptide is inserted at a position that is immediately adjacent and C-terminal to amino acid 1239 of the Cas9 protein set forth in SEQ ID NO:5, or a corresponding amino acid residue in another Cas9 polypeptide; and wherein the Cas9 fusion polypeptide retains cleavage and/or binding activity relative to the activity of the Cas9 polypeptide without the inserted heterologous amino acid or heterologous polypeptide. In some cases, a Cas9 fusion polypeptide of the present disclosure comprises: (a) a Cas9 polypeptide; and (b) a heterologous amino acid or heterologous polypeptide inserted internally within the Cas9 polypeptide, wherein the heterologous amino acid or heterologous polypeptide is inserted at a position that is immediately adjacent and N-terminal to amino acid 1239 of the Cas9 protein set forth in SEQ ID NO:5, or a corresponding amino acid residue in another Cas9 polypeptide; and wherein the Cas9 fusion polypeptide retains cleavage and/or binding activity relative to the activity of the Cas9 polypeptide without the inserted heterologous amino acid or heterologous polypeptide. In some cases, the heterologous amino acid or heterologous polypeptide is inserted between residues 1238-1239, or between residues 1239-1240, of the Cas9 protein set forth in SEQ ID NO:5, or a corresponding amino acid residue in another Cas9 polypeptide.

[0187] In some cases, a Cas9 fusion polypeptide of the present disclosure comprises: (a) a Cas9 polypeptide; and (b) a heterologous amino acid or heterologous polypeptide inserted internally within the Cas9 polypeptide, wherein the heterologous amino acid or heterologous polypeptide is inserted at a position that is immediately adjacent and C-terminal to amino acid 1240 of the Cas9 protein set forth in SEQ ID NO:5, or a corresponding amino acid residue in another Cas9 polypeptide; and wherein the Cas9 fusion polypeptide retains cleavage and/or binding activity relative to the activity of the Cas9 polypeptide without the inserted heterologous amino acid or heterologous polypeptide. In some cases, a Cas9 fusion polypeptide of the present disclosure comprises: (a) a Cas9 polypeptide; and (b) a heterologous amino acid or heterologous polypeptide inserted internally within the Cas9 polypeptide, wherein the heterologous amino acid or heterologous polypeptide is inserted at a position that is immediately adjacent and N-terminal to amino acid 1240 of the Cas9 protein set forth in SEQ ID NO:5, or a corresponding amino acid residue in another Cas9 polypeptide; and wherein the Cas9 fusion polypeptide retains cleavage and/or binding activity relative to the activity of the Cas9 polypeptide without the inserted heterologous amino acid or heterologous polypeptide. In some cases, the heterologous amino acid or heterologous polypeptide is inserted between residues 1239-1240, or between residues 1240-1241, of the Cas9 protein set forth in SEQ ID NO:5, or a corresponding amino acid residue in another Cas9 polypeptide.

[0188] In some cases, a Cas9 fusion polypeptide of the present disclosure comprises: (a) a Cas9 polypeptide; and (b) a heterologous amino acid or heterologous polypeptide inserted internally within the Cas9 polypeptide, wherein the heterologous amino acid or heterologous polypeptide is inserted at a position that is immediately adjacent and C-terminal to amino acid 1242 of the Cas9 protein set forth in SEQ ID NO:5, or a corresponding amino acid residue in another Cas9 polypeptide; and wherein the Cas9 fusion polypeptide retains cleavage and/or binding activity relative to the activity of the Cas9 polypeptide without the inserted heterologous amino acid or heterologous polypeptide. In some cases, a Cas9 fusion polypeptide of the present disclosure comprises: (a) a Cas9 polypeptide; and (b) a heterologous amino acid or heterologous polypeptide inserted internally within the Cas9 polypeptide, wherein the heterologous amino acid or heterologous polypeptide is inserted at a position that is immediately adjacent and N-terminal to amino acid 1242 of the Cas9 protein set forth in SEQ ID NO:5, or a corresponding amino acid residue in another Cas9 polypeptide; and wherein the Cas9 fusion polypeptide retains cleavage and/or binding activity relative to the activity of the Cas9 polypeptide without the inserted heterologous amino acid or heterologous polypeptide. In some cases, the heterologous amino acid or heterologous polypeptide is inserted between residues 1241-1242, or between residues 1242-1243, of the Cas9 protein set forth in SEQ ID NO:5, or a corresponding amino acid residue in another Cas9 polypeptide.

[0189] In some cases, a Cas9 fusion polypeptide of the present disclosure comprises: (a) a Cas9 polypeptide; and (b) a heterologous amino acid or heterologous polypeptide inserted internally within the Cas9 polypeptide, wherein the heterologous amino acid or heterologous polypeptide is inserted at a position that is immediately adjacent and C-terminal to amino acid 1243 of the Cas9 protein set forth in SEQ ID NO:5, or a corresponding amino acid residue in another Cas9 polypeptide; and wherein the Cas9 fusion polypeptide retains cleavage and/or binding activity relative to the activity of the Cas9 polypeptide without the inserted heterologous amino acid or heterologous polypeptide. In some cases, a Cas9 fusion polypeptide of the present disclosure comprises: (a) a Cas9 polypeptide; and (b) a heterologous amino acid or heterologous polypeptide inserted internally within the Cas9 polypeptide, wherein the heterologous amino acid or heterologous polypeptide is inserted at a position that is immediately adjacent and N-terminal to amino acid 1243 of the Cas9 protein set forth in SEQ ID NO:5, or a corresponding amino acid residue in another Cas9 polypeptide; and wherein the Cas9 fusion polypeptide retains cleavage and/or binding activity relative to the activity of the Cas9 polypeptide without the inserted heterologous amino acid or heterologous polypeptide. In some cases, the heterologous amino acid or heterologous polypeptide is inserted between residues 1242-1243, or between residues 1243-1244, of the Cas9 protein set forth in SEQ ID NO:5, or a corresponding amino acid residue in another Cas9 polypeptide.

[0190] In some cases, a Cas9 fusion polypeptide of the present disclosure comprises: (a) a Cas9 polypeptide; and (b) a heterologous amino acid or heterologous polypeptide inserted internally within the Cas9 polypeptide, wherein the heterologous amino acid or heterologous polypeptide is inserted at a position that is immediately adjacent and C-terminal to amino acid 1244 of the Cas9 protein set forth in SEQ ID NO:5, or a corresponding amino acid residue in another Cas9 polypeptide; and wherein the Cas9 fusion polypeptide retains cleavage and/or binding activity relative to the activity of the Cas9 polypeptide without the inserted heterologous amino acid or heterologous polypeptide. In some cases, a Cas9 fusion polypeptide of the present disclosure comprises: (a) a Cas9 polypeptide; and (b) a heterologous amino acid or heterologous polypeptide inserted internally within the Cas9 polypeptide, wherein the heterologous amino acid or heterologous polypeptide is inserted at a position that is immediately adjacent and N-terminal to amino acid 1244 of the Cas9 protein set forth in SEQ ID NO:5, or a corresponding amino acid residue in another Cas9 polypeptide; and wherein the Cas9 fusion polypeptide retains cleavage and/or binding activity relative to the activity of the Cas9 polypeptide without the inserted heterologous amino acid or heterologous polypeptide. In some cases, the heterologous amino acid or heterologous polypeptide is inserted between residues 1243-1244, or between residues 1244-1245, of the Cas9 protein set forth in SEQ ID NO:5, or a corresponding amino acid residue in another Cas9 polypeptide.

[0191] In some cases, a Cas9 fusion polypeptide of the present disclosure comprises: (a) a Cas9 polypeptide; and (b) a heterologous amino acid or heterologous polypeptide inserted internally within the Cas9 polypeptide, wherein the heterologous amino acid or heterologous polypeptide is inserted at a position that is immediately adjacent and C-terminal to amino acid 1246 of the Cas9 protein set forth in SEQ ID NO:5, or a corresponding amino acid residue in another Cas9 polypeptide; and wherein the Cas9 fusion polypeptide retains cleavage and/or binding activity relative to the activity of the Cas9 polypeptide without the inserted heterologous amino acid or heterologous polypeptide. In some cases, a Cas9 fusion polypeptide of the present disclosure comprises: (a) a Cas9 polypeptide; and (b) a heterologous amino acid or heterologous polypeptide inserted internally within the Cas9 polypeptide, wherein the heterologous amino acid or heterologous polypeptide is inserted at a position that is immediately adjacent and N-terminal to amino acid 1246 of the Cas9 protein set forth in SEQ ID NO:5, or a corresponding amino acid residue in another Cas9 polypeptide; and wherein the Cas9 fusion polypeptide retains cleavage and/or binding activity relative to the activity of the Cas9 polypeptide without the inserted heterologous amino acid or heterologous polypeptide. In some cases, the heterologous amino acid or heterologous polypeptide is inserted between residues 1245-1246, or between residues 1246-1247, of the Cas9 protein set forth in SEQ ID NO:5, or a corresponding amino acid residue in another Cas9 polypeptide.

[0192] In some cases, a Cas9 fusion polypeptide of the present disclosure comprises: (a) a Cas9 polypeptide; and (b) a heterologous amino acid or heterologous polypeptide inserted internally within the Cas9 polypeptide, wherein the heterologous amino acid or heterologous polypeptide is inserted at a position that is immediately adjacent and C-terminal to amino acid 1247 of the Cas9 protein set forth in SEQ ID NO:5, or a corresponding amino acid residue in another Cas9 polypeptide; and wherein the Cas9 fusion polypeptide retains cleavage and/or binding activity relative to the activity of the Cas9 polypeptide without the inserted heterologous amino acid or heterologous polypeptide. In some cases, a Cas9 fusion polypeptide of the present disclosure comprises: (a) a Cas9 polypeptide; and (b) a heterologous amino acid or heterologous polypeptide inserted internally within the Cas9 polypeptide, wherein the heterologous amino acid or heterologous polypeptide is inserted at a position that is immediately adjacent and N-terminal to amino acid 1247 of the Cas9 protein set forth in SEQ ID NO:5, or a corresponding amino acid residue in another Cas9 polypeptide; and wherein the Cas9 fusion polypeptide retains cleavage and/or binding activity relative to the activity of the Cas9 polypeptide without the inserted heterologous amino acid or heterologous polypeptide. In some cases, the heterologous amino acid or heterologous polypeptide is inserted between residues 1246-1247, or between residues 1247-1248, of the Cas9 protein set forth in SEQ ID NO:5, or a corresponding amino acid residue in another Cas9 polypeptide.

[0193] In some cases, a Cas9 fusion polypeptide of the present disclosure comprises: (a) a Cas9 polypeptide; and (b) a heterologous amino acid or heterologous polypeptide inserted internally within the Cas9 polypeptide, wherein the heterologous amino acid or heterologous polypeptide is inserted at a position that is immediately adjacent and C-terminal to amino acid 1248 of the Cas9 protein set forth in SEQ ID NO:5, or a corresponding amino acid residue in another Cas9 polypeptide; and wherein the Cas9 fusion polypeptide retains cleavage and/or binding activity relative to the activity of the Cas9 polypeptide without the inserted heterologous amino acid or heterologous polypeptide. In some cases, a Cas9 fusion polypeptide of the present disclosure comprises: (a) a Cas9 polypeptide; and (b) a heterologous amino acid or heterologous polypeptide inserted internally within the Cas9 polypeptide, wherein the heterologous amino acid or heterologous polypeptide is inserted at a position that is immediately adjacent and N-terminal to amino acid 1248 of the Cas9 protein set forth in SEQ ID NO:5, or a corresponding amino acid residue in another Cas9 polypeptide; and wherein the Cas9 fusion polypeptide retains cleavage and/or binding activity relative to the activity of the Cas9 polypeptide without the inserted heterologous amino acid or heterologous polypeptide. In some cases, the heterologous amino acid or heterologous polypeptide is inserted between residues 1247-1248, or between residues 1248-1249, of the Cas9 protein set forth in SEQ ID NO:5, or a corresponding amino acid residue in another Cas9 polypeptide.

[0194] In some cases, a Cas9 fusion polypeptide of the present disclosure comprises: (a) a Cas9 polypeptide; and (b) a heterologous amino acid or heterologous polypeptide inserted internally within the Cas9 polypeptide, wherein the heterologous amino acid or heterologous polypeptide is inserted at a position that is immediately adjacent and C-terminal to amino acid 1250 of the Cas9 protein set forth in SEQ ID NO:5, or a corresponding amino acid residue in another Cas9 polypeptide; and wherein the Cas9 fusion polypeptide retains cleavage and/or binding activity relative to the activity of the Cas9 polypeptide without the inserted heterologous amino acid or heterologous polypeptide. In some cases, a Cas9 fusion polypeptide of the present disclosure comprises: (a) a Cas9 polypeptide; and (b) a heterologous amino acid or heterologous polypeptide inserted internally within the Cas9 polypeptide, wherein the heterologous amino acid or heterologous polypeptide is inserted at a position that is immediately adjacent and N-terminal to amino acid 1250 of the Cas9 protein set forth in SEQ ID NO:5, or a corresponding amino acid residue in another Cas9 polypeptide; and wherein the Cas9 fusion polypeptide retains cleavage and/or binding activity relative to the activity of the Cas9 polypeptide without the inserted heterologous amino acid or heterologous polypeptide. In some cases, the heterologous amino acid or heterologous polypeptide is inserted between residues 1249-1250, or between residues 1250-1251, of the Cas9 protein set forth in SEQ ID NO:5, or a corresponding amino acid residue in another Cas9 polypeptide.

[0195] In some cases, a Cas9 fusion polypeptide of the present disclosure comprises: (a) a Cas9 polypeptide; and (b) a heterologous amino acid or heterologous polypeptide inserted internally within the Cas9 polypeptide, wherein the heterologous amino acid or heterologous polypeptide is inserted at a position that is immediately adjacent and C-terminal to amino acid 1251 of the Cas9 protein set forth in SEQ ID NO:5, or a corresponding amino acid residue in another Cas9 polypeptide; and wherein the Cas9 fusion polypeptide retains cleavage and/or binding activity relative to the activity of the Cas9 polypeptide without the inserted heterologous amino acid or heterologous polypeptide. In some cases, a Cas9 fusion polypeptide of the present disclosure comprises: (a) a Cas9 polypeptide; and (b) a heterologous amino acid or heterologous polypeptide inserted internally within the Cas9 polypeptide, wherein the heterologous amino acid or heterologous polypeptide is inserted at a position that is immediately adjacent and N-terminal to amino acid 1251 of the Cas9 protein set forth in SEQ ID NO:5, or a corresponding amino acid residue in another Cas9 polypeptide; and wherein the Cas9 fusion polypeptide retains cleavage and/or binding activity relative to the activity of the Cas9 polypeptide without the inserted heterologous amino acid or heterologous polypeptide. In some cases, the heterologous amino acid or heterologous polypeptide is inserted between residues 1250-1251, or between residues 1251-1252, of the Cas9 protein set forth in SEQ ID NO:5, or a corresponding amino acid residue in another Cas9 polypeptide.

[0196] In some cases, a Cas9 fusion polypeptide of the present disclosure comprises: (a) a Cas9 polypeptide; and (b) a heterologous amino acid or heterologous polypeptide inserted internally within the Cas9 polypeptide, wherein the heterologous amino acid or heterologous polypeptide is inserted at a position that is immediately adjacent and C-terminal to amino acid 1252 of the Cas9 protein set forth in SEQ ID NO:5, or a corresponding amino acid residue in another Cas9 polypeptide; and wherein the Cas9 fusion polypeptide retains cleavage and/or binding activity relative to the activity of the Cas9 polypeptide without the inserted heterologous amino acid or heterologous polypeptide. In some cases, a Cas9 fusion polypeptide of the present disclosure comprises: (a) a Cas9 polypeptide; and (b) a heterologous amino acid or heterologous polypeptide inserted internally within the Cas9 polypeptide, wherein the heterologous amino acid or heterologous polypeptide is inserted at a position that is immediately adjacent and N-terminal to amino acid 1252 of the Cas9 protein set forth in SEQ ID NO:5, or a corresponding amino acid residue in another Cas9 polypeptide; and wherein the Cas9 fusion polypeptide retains cleavage and/or binding activity relative to the activity of the Cas9 polypeptide without the inserted heterologous amino acid or heterologous polypeptide. In some cases, the heterologous amino acid or heterologous polypeptide is inserted between residues 1251-1252, or between residues 1252-1253, of the Cas9 protein set forth in SEQ ID NO:5, or a corresponding amino acid residue in another Cas9 polypeptide.

[0197] In some cases, a Cas9 fusion polypeptide of the present disclosure comprises: (a) a Cas9 polypeptide; and (b) a heterologous amino acid or heterologous polypeptide inserted internally within the Cas9 polypeptide, wherein the heterologous amino acid or heterologous polypeptide is inserted at a position that is immediately adjacent and C-terminal to amino acid 1253 of the Cas9 protein set forth in SEQ ID NO:5, or a corresponding amino acid residue in another Cas9 polypeptide; and wherein the Cas9 fusion polypeptide retains cleavage and/or binding activity relative to the activity of the Cas9 polypeptide without the inserted heterologous amino acid or heterologous polypeptide. In some cases, a Cas9 fusion polypeptide of the present disclosure comprises: (a) a Cas9 polypeptide; and (b) a heterologous amino acid or heterologous polypeptide inserted internally within the Cas9 polypeptide, wherein the heterologous amino acid or heterologous polypeptide is inserted at a position that is immediately adjacent and N-terminal to amino acid 1253 of the Cas9 protein set forth in SEQ ID NO:5, or a corresponding amino acid residue in another Cas9 polypeptide; and wherein the Cas9 fusion polypeptide retains cleavage and/or binding activity relative to the activity of the Cas9 polypeptide without the inserted heterologous amino acid or heterologous polypeptide. In some cases, the heterologous amino acid or heterologous polypeptide is inserted between residues 1252-1253, or between residues 1253-1254, of the Cas9 protein set forth in SEQ ID NO:5, or a corresponding amino acid residue in another Cas9 polypeptide.

[0198] In some cases, a Cas9 fusion polypeptide of the present disclosure comprises: (a) a Cas9 polypeptide; and (b) a heterologous amino acid or heterologous polypeptide inserted internally within the Cas9 polypeptide, wherein the heterologous amino acid or heterologous polypeptide is inserted at a position that is immediately adjacent and C-terminal to amino acid 1255 of the Cas9 protein set forth in SEQ ID NO:5, or a corresponding amino acid residue in another Cas9 polypeptide; and wherein the Cas9 fusion polypeptide retains cleavage and/or binding activity relative to the activity of the Cas9 polypeptide without the inserted heterologous amino acid or heterologous polypeptide. In some cases, a Cas9 fusion polypeptide of the present disclosure comprises: (a) a Cas9 polypeptide; and (b) a heterologous amino acid or heterologous polypeptide inserted internally within the Cas9 polypeptide, wherein the heterologous amino acid or heterologous polypeptide is inserted at a position that is immediately adjacent and N-terminal to amino acid 1255 of the Cas9 protein set forth in SEQ ID NO:5, or a corresponding amino acid residue in another Cas9 polypeptide; and wherein the Cas9 fusion polypeptide retains cleavage and/or binding activity relative to the activity of the Cas9 polypeptide without the inserted heterologous amino acid or heterologous polypeptide. In some cases, the heterologous amino acid or heterologous polypeptide is inserted between residues 1254-1255, or between residues 1255-1256, of the Cas9 protein set forth in SEQ ID NO:5, or a corresponding amino acid residue in another Cas9 polypeptide.

[0199] In some cases, a Cas9 fusion polypeptide of the present disclosure comprises: (a) a Cas9 polypeptide; and (b) a heterologous amino acid or heterologous polypeptide inserted internally within the Cas9 polypeptide, wherein the heterologous amino acid or heterologous polypeptide is inserted at a position that is immediately adjacent and C-terminal to amino acid 1259 of the Cas9 protein set forth in SEQ ID NO:5, or a corresponding amino acid residue in another Cas9 polypeptide; and wherein the Cas9 fusion polypeptide retains cleavage and/or binding activity relative to the activity of the Cas9 polypeptide without the inserted heterologous amino acid or heterologous polypeptide. In some cases, a Cas9 fusion polypeptide of the present disclosure comprises: (a) a Cas9 polypeptide; and (b) a heterologous amino acid or heterologous polypeptide inserted internally within the Cas9 polypeptide, wherein the heterologous amino acid or heterologous polypeptide is inserted at a position that is immediately adjacent and N-terminal to amino acid 1259 of the Cas9 protein set forth in SEQ ID NO:5, or a corresponding amino acid residue in another Cas9 polypeptide; and wherein the Cas9 fusion polypeptide retains cleavage and/or binding activity relative to the activity of the Cas9 polypeptide without the inserted heterologous amino acid or heterologous polypeptide. In some cases, the heterologous amino acid or heterologous polypeptide is inserted between residues 1258-1259, or between residues 1259-1260, of the Cas9 protein set forth in SEQ ID NO:5, or a corresponding amino acid residue in another Cas9 polypeptide.

[0200] In some cases, a Cas9 fusion polypeptide of the present disclosure comprises: (a) a Cas9 polypeptide; and (b) a heterologous amino acid or heterologous polypeptide inserted internally within the Cas9 polypeptide, wherein the heterologous amino acid or heterologous polypeptide is inserted at a position that is immediately adjacent and C-terminal to amino acid 1260 of the Cas9 protein set forth in SEQ ID NO:5, or a corresponding amino acid residue in another Cas9 polypeptide; and wherein the Cas9 fusion polypeptide retains cleavage and/or binding activity relative to the activity of the Cas9 polypeptide without the inserted heterologous amino acid or heterologous polypeptide. In some cases, a Cas9 fusion polypeptide of the present disclosure comprises: (a) a Cas9 polypeptide; and (b) a heterologous amino acid or heterologous polypeptide inserted internally within the Cas9 polypeptide, wherein the heterologous amino acid or heterologous polypeptide is inserted at a position that is immediately adjacent and N-terminal to amino acid 1260 of the Cas9 protein set forth in SEQ ID NO:5, or a corresponding amino acid residue in another Cas9 polypeptide; and wherein the Cas9 fusion polypeptide retains cleavage and/or binding activity relative to the activity of the Cas9 polypeptide without the inserted heterologous amino acid or heterologous polypeptide. In some cases, the heterologous amino acid or heterologous polypeptide is inserted between residues 1259-1260, or between residues 1260-1261, of the Cas9 protein set forth in SEQ ID NO:5, or a corresponding amino acid residue in another Cas9 polypeptide.

[0201] In some cases, a Cas9 fusion polypeptide of the present disclosure comprises: (a) a Cas9 polypeptide; and (b) a heterologous amino acid or heterologous polypeptide inserted internally within the Cas9 polypeptide, wherein the heterologous amino acid or heterologous polypeptide is inserted at a position that is immediately adjacent and C-terminal to amino acid 1262 of the Cas9 protein set forth in SEQ ID NO:5, or a corresponding amino acid residue in another Cas9 polypeptide; and wherein the Cas9 fusion polypeptide retains cleavage and/or binding activity relative to the activity of the Cas9 polypeptide without the inserted heterologous amino acid or heterologous polypeptide. In some cases, a Cas9 fusion polypeptide of the present disclosure comprises: (a) a Cas9 polypeptide; and (b) a heterologous amino acid or heterologous polypeptide inserted internally within the Cas9 polypeptide, wherein the heterologous amino acid or heterologous polypeptide is inserted at a position that is immediately adjacent and N-terminal to amino acid 1262 of the Cas9 protein set forth in SEQ ID NO:5, or a corresponding amino acid residue in another Cas9 polypeptide; and wherein the Cas9 fusion polypeptide retains cleavage and/or binding activity relative to the activity of the Cas9 polypeptide without the inserted heterologous amino acid or heterologous polypeptide. In some cases, the heterologous amino acid or heterologous polypeptide is inserted between residues 1261-1262, or between residues 1262-1263, of the Cas9 protein set forth in SEQ ID NO:5, or a corresponding amino acid residue in another Cas9 polypeptide.

[0202] In some cases, a Cas9 fusion polypeptide of the present disclosure comprises: (a) a Cas9 polypeptide; and (b) a heterologous amino acid or heterologous polypeptide inserted internally within the Cas9 polypeptide, wherein the heterologous amino acid or heterologous polypeptide is inserted at a position that is immediately adjacent and C-terminal to amino acid 1267 of the Cas9 protein set forth in SEQ ID NO:5, or a corresponding amino acid residue in another Cas9 polypeptide; and wherein the Cas9 fusion polypeptide retains cleavage and/or binding activity relative to the activity of the Cas9 polypeptide without the inserted heterologous amino acid or heterologous polypeptide. In some cases, a Cas9 fusion polypeptide of the present disclosure comprises: (a) a Cas9 polypeptide; and (b) a heterologous amino acid or heterologous polypeptide inserted internally within the Cas9 polypeptide, wherein the heterologous amino acid or heterologous polypeptide is inserted at a position that is immediately adjacent and N-terminal to amino acid 1267 of the Cas9 protein set forth in SEQ ID NO:5, or a corresponding amino acid residue in another Cas9 polypeptide; and wherein the Cas9 fusion polypeptide retains cleavage and/or binding activity relative to the activity of the Cas9 polypeptide without the inserted heterologous amino acid or heterologous polypeptide. In some cases, the heterologous amino acid or heterologous polypeptide is inserted between residues 1266-1267, or between residues 1267-1268, of the Cas9 protein set forth in SEQ ID NO:5, or a corresponding amino acid residue in another Cas9 polypeptide.

[0203] In some cases, a Cas9 fusion polypeptide of the present disclosure comprises: (a) a Cas9 polypeptide; and (b) a heterologous amino acid or heterologous polypeptide inserted internally within the Cas9 polypeptide, wherein the heterologous amino acid or heterologous polypeptide is inserted at a position that is immediately adjacent and C-terminal to amino acid 1268 of the Cas9 protein set forth in SEQ ID NO:5, or a corresponding amino acid residue in another Cas9 polypeptide; and wherein the Cas9 fusion polypeptide retains cleavage and/or binding activity relative to the activity of the Cas9 polypeptide without the inserted heterologous amino acid or heterologous polypeptide. In some cases, a Cas9 fusion polypeptide of the present disclosure comprises: (a) a Cas9 polypeptide; and (b) a heterologous amino acid or heterologous polypeptide inserted internally within the Cas9 polypeptide, wherein the heterologous amino acid or heterologous polypeptide is inserted at a position that is immediately adjacent and N-terminal to amino acid 1268 of the Cas9 protein set forth in SEQ ID NO:5, or a corresponding amino acid residue in another Cas9 polypeptide; and wherein the Cas9 fusion polypeptide retains cleavage and/or binding activity relative to the activity of the Cas9 polypeptide without the inserted heterologous amino acid or heterologous polypeptide. In some cases, the heterologous amino acid or heterologous polypeptide is inserted between residues 1267-1268, or between residues 1268-1269, of the Cas9 protein set forth in SEQ ID NO:5, or a corresponding amino acid residue in another Cas9 polypeptide.

[0204] In some cases, a Cas9 fusion polypeptide of the present disclosure comprises: (a) a Cas9 polypeptide; and (b) a heterologous amino acid or heterologous polypeptide inserted internally within the Cas9 polypeptide, wherein the heterologous amino acid or heterologous polypeptide is inserted at a position that is immediately adjacent and C-terminal to amino acid 1269 of the Cas9 protein set forth in SEQ ID NO:5, or a corresponding amino acid residue in another Cas9 polypeptide; and wherein the Cas9 fusion polypeptide retains cleavage and/or binding activity relative to the activity of the Cas9 polypeptide without the inserted heterologous amino acid or heterologous polypeptide. In some cases, a Cas9 fusion polypeptide of the present disclosure comprises: (a) a Cas9 polypeptide; and (b) a heterologous amino acid or heterologous polypeptide inserted internally within the Cas9 polypeptide, wherein the heterologous amino acid or heterologous polypeptide is inserted at a position that is immediately adjacent and N-terminal to amino acid 1269 of the Cas9 protein set forth in SEQ ID NO:5, or a corresponding amino acid residue in another Cas9 polypeptide; and wherein the Cas9 fusion polypeptide retains cleavage and/or binding activity relative to the activity of the Cas9 polypeptide without the inserted heterologous amino acid or heterologous polypeptide. In some cases, the heterologous amino acid or heterologous polypeptide is inserted between residues 1268-1269, or between residues 1269-1270, of the Cas9 protein set forth in SEQ ID NO:5, or a corresponding amino acid residue in another Cas9 polypeptide.

[0205] In some cases, a Cas9 fusion polypeptide of the present disclosure comprises: (a) a Cas9 polypeptide; and (b) a heterologous amino acid or heterologous polypeptide inserted internally within the Cas9 polypeptide, wherein the heterologous amino acid or heterologous polypeptide is inserted at a position that is immediately adjacent and C-terminal to amino acid 1270 of the Cas9 protein set forth in SEQ ID NO:5, or a corresponding amino acid residue in another Cas9 polypeptide; and wherein the Cas9 fusion polypeptide retains cleavage and/or binding activity relative to the activity of the Cas9 polypeptide without the inserted heterologous amino acid or heterologous polypeptide. In some cases, a Cas9 fusion polypeptide of the present disclosure comprises: (a) a Cas9 polypeptide; and (b) a heterologous amino acid or heterologous polypeptide inserted internally within the Cas9 polypeptide, wherein the heterologous amino acid or heterologous polypeptide is inserted at a position that is immediately adjacent and N-terminal to amino acid 1270 of the Cas9 protein set forth in SEQ ID NO:5, or a corresponding amino acid residue in another Cas9 polypeptide; and wherein the Cas9 fusion polypeptide retains cleavage and/or binding activity relative to the activity of the Cas9 polypeptide without the inserted heterologous amino acid or heterologous polypeptide. In some cases, the heterologous amino acid or heterologous polypeptide is inserted between residues 1269-1270, or between residues 1270-1271, of the Cas9 protein set forth in SEQ ID NO:5, or a corresponding amino acid residue in another Cas9 polypeptide.

[0206] In some cases, a Cas9 fusion polypeptide of the present disclosure comprises: (a) a Cas9 polypeptide; and (b) a heterologous amino acid or heterologous polypeptide inserted internally within the Cas9 polypeptide, wherein the heterologous amino acid or heterologous polypeptide is inserted at a position that is immediately adjacent and C-terminal to amino acid 1281 of the Cas9 protein set forth in SEQ ID NO:5, or a corresponding amino acid residue in another Cas9 polypeptide; and wherein the Cas9 fusion polypeptide retains cleavage and/or binding activity relative to the activity of the Cas9 polypeptide without the inserted heterologous amino acid or heterologous polypeptide. In some cases, a Cas9 fusion polypeptide of the present disclosure comprises: (a) a Cas9 polypeptide; and (b) a heterologous amino acid or heterologous polypeptide inserted internally within the Cas9 polypeptide, wherein the heterologous amino acid or heterologous polypeptide is inserted at a position that is immediately adjacent and N-terminal to amino acid 1281 of the Cas9 protein set forth in SEQ ID NO:5, or a corresponding amino acid residue in another Cas9 polypeptide; and wherein the Cas9 fusion polypeptide retains cleavage and/or binding activity relative to the activity of the Cas9 polypeptide without the inserted heterologous amino acid or heterologous polypeptide. In some cases, the heterologous amino acid or heterologous polypeptide is inserted between residues 1280-1281, or between residues 1281-1282, of the Cas9 protein set forth in SEQ ID NO:5, or a corresponding amino acid residue in another Cas9 polypeptide.

[0207] In some cases, a Cas9 fusion polypeptide of the present disclosure comprises: (a) a Cas9 polypeptide; and (b) a heterologous amino acid or heterologous polypeptide inserted internally within the Cas9 polypeptide, wherein the heterologous amino acid or heterologous polypeptide is inserted at a position that is immediately adjacent and C-terminal to amino acid 1282 of the Cas9 protein set forth in SEQ ID NO:5, or a corresponding amino acid residue in another Cas9 polypeptide; and wherein the Cas9 fusion polypeptide retains cleavage and/or binding activity relative to the activity of the Cas9 polypeptide without the inserted heterologous amino acid or heterologous polypeptide. In some cases, a Cas9 fusion polypeptide of the present disclosure comprises: (a) a Cas9 polypeptide; and (b) a heterologous amino acid or heterologous polypeptide inserted internally within the Cas9 polypeptide, wherein the heterologous amino acid or heterologous polypeptide is inserted at a position that is immediately adjacent and N-terminal to amino acid 1282 of the Cas9 protein set forth in SEQ ID NO:5, or a corresponding amino acid residue in another Cas9 polypeptide; and wherein the Cas9 fusion polypeptide retains cleavage and/or binding activity relative to the activity of the Cas9 polypeptide without the inserted heterologous amino acid or heterologous polypeptide. In some cases, the heterologous amino acid or heterologous polypeptide is inserted between residues 1281-1282, or between residues 1282-1283, of the Cas9 protein set forth in SEQ ID NO:5, or a corresponding amino acid residue in another Cas9 polypeptide.

[0208] In some cases, a Cas9 fusion polypeptide of the present disclosure comprises: (a) a Cas9 polypeptide; and (b) a heterologous amino acid or heterologous polypeptide inserted internally within the Cas9 polypeptide, wherein the heterologous amino acid or heterologous polypeptide is inserted at a position that is immediately adjacent and C-terminal to amino acid 1283 of the Cas9 protein set forth in SEQ ID NO:5, or a corresponding amino acid residue in another Cas9 polypeptide; and wherein the Cas9 fusion polypeptide retains cleavage and/or binding activity relative to the activity of the Cas9 polypeptide without the inserted heterologous amino acid or heterologous polypeptide. In some cases, a Cas9 fusion polypeptide of the present disclosure comprises: (a) a Cas9 polypeptide; and (b) a heterologous amino acid or heterologous polypeptide inserted internally within the Cas9 polypeptide, wherein the heterologous amino acid or heterologous polypeptide is inserted at a position that is immediately adjacent and N-terminal to amino acid 1283 of the Cas9 protein set forth in SEQ ID NO:5, or a corresponding amino acid residue in another Cas9 polypeptide; and wherein the Cas9 fusion polypeptide retains cleavage and/or binding activity relative to the activity of the Cas9 polypeptide without the inserted heterologous amino acid or heterologous polypeptide. In some cases, the heterologous amino acid or heterologous polypeptide is inserted between residues 1282-1283, or between residues 1283-1284, of the Cas9 protein set forth in SEQ ID NO:5, or a corresponding amino acid residue in another Cas9 polypeptide.

[0209] In some cases, a Cas9 fusion polypeptide of the present disclosure comprises: (a) a Cas9 polypeptide; and (b) a heterologous amino acid or heterologous polypeptide inserted internally within the Cas9 polypeptide, wherein the heterologous amino acid or heterologous polypeptide is inserted at a position that is immediately adjacent and C-terminal to amino acid 1284 of the Cas9 protein set forth in SEQ ID NO:5, or a corresponding amino acid residue in another Cas9 polypeptide; and wherein the Cas9 fusion polypeptide retains cleavage and/or binding activity relative to the activity of the Cas9 polypeptide without the inserted heterologous amino acid or heterologous polypeptide. In some cases, a Cas9 fusion polypeptide of the present disclosure comprises: (a) a Cas9 polypeptide; and (b) a heterologous amino acid or heterologous polypeptide inserted internally within the Cas9 polypeptide, wherein the heterologous amino acid or heterologous polypeptide is inserted at a position that is immediately adjacent and N-terminal to amino acid 1284 of the Cas9 protein set forth in SEQ ID NO:5, or a corresponding amino acid residue in another Cas9 polypeptide; and wherein the Cas9 fusion polypeptide retains cleavage and/or binding activity relative to the activity of the Cas9 polypeptide without the inserted heterologous amino acid or heterologous polypeptide. In some cases, the heterologous amino acid or heterologous polypeptide is inserted between residues 1283-1284, or between residues 1284-1285, of the Cas9 protein set forth in SEQ ID NO:5, or a corresponding amino acid residue in another Cas9 polypeptide.

[0210] In some cases, a Cas9 fusion polypeptide of the present disclosure comprises: (a) a Cas9 polypeptide; and (b) a heterologous amino acid or heterologous polypeptide inserted internally within the Cas9 polypeptide, wherein the heterologous amino acid or heterologous polypeptide is inserted at a position that is immediately adjacent and C-terminal to amino acid 1287 of the Cas9 protein set forth in SEQ ID NO:5, or a corresponding amino acid residue in another Cas9 polypeptide; and wherein the Cas9 fusion polypeptide retains cleavage and/or binding activity relative to the activity of the Cas9 polypeptide without the inserted heterologous amino acid or heterologous polypeptide. In some cases, a Cas9 fusion polypeptide of the present disclosure comprises: (a) a Cas9 polypeptide; and (b) a heterologous amino acid or heterologous polypeptide inserted internally within the Cas9 polypeptide, wherein the heterologous amino acid or heterologous polypeptide is inserted at a position that is immediately adjacent and N-terminal to amino acid 1287 of the Cas9 protein set forth in SEQ ID NO:5, or a corresponding amino acid residue in another Cas9 polypeptide; and wherein the Cas9 fusion polypeptide retains cleavage and/or binding activity relative to the activity of the Cas9 polypeptide without the inserted heterologous amino acid or heterologous polypeptide. In some cases, the heterologous amino acid or heterologous polypeptide is inserted between residues 1286-1287, or between residues 1287-1288, of the Cas9 protein set forth in SEQ ID NO:5, or a corresponding amino acid residue in another Cas9 polypeptide.

[0211] In some cases, a Cas9 fusion polypeptide of the present disclosure comprises: (a) a Cas9 polypeptide; and (b) a heterologous amino acid or heterologous polypeptide inserted internally within the Cas9 polypeptide, wherein the heterologous amino acid or heterologous polypeptide is inserted at a position that is immediately adjacent and C-terminal to amino acid 1289 of the Cas9 protein set forth in SEQ ID NO:5, or a corresponding amino acid residue in another Cas9 polypeptide; and wherein the Cas9 fusion polypeptide retains cleavage and/or binding activity relative to the activity of the Cas9 polypeptide without the inserted heterologous amino acid or heterologous polypeptide. In some cases, a Cas9 fusion polypeptide of the present disclosure comprises: (a) a Cas9 polypeptide; and (b) a heterologous amino acid or heterologous polypeptide inserted internally within the Cas9 polypeptide, wherein the heterologous amino acid or heterologous polypeptide is inserted at a position that is immediately adjacent and N-terminal to amino acid 1289 of the Cas9 protein set forth in SEQ ID NO:5, or a corresponding amino acid residue in another Cas9 polypeptide; and wherein the Cas9 fusion polypeptide retains cleavage and/or binding activity relative to the activity of the Cas9 polypeptide without the inserted heterologous amino acid or heterologous polypeptide. In some cases, the heterologous amino acid or heterologous polypeptide is inserted between residues 1288-1289, or between residues 1289-1290, of the Cas9 protein set forth in SEQ ID NO:5, or a corresponding amino acid residue in another Cas9 polypeptide.

[0212] In some cases, a Cas9 fusion polypeptide of the present disclosure comprises: (a) a Cas9 polypeptide; and (b) a heterologous amino acid or heterologous polypeptide inserted internally within the Cas9 polypeptide, wherein the heterologous amino acid or heterologous polypeptide is inserted at a position that is immediately adjacent and C-terminal to amino acid 1291 of the Cas9 protein set forth in SEQ ID NO:5, or a corresponding amino acid residue in another Cas9 polypeptide; and wherein the Cas9 fusion polypeptide retains cleavage and/or binding activity relative to the activity of the Cas9 polypeptide without the inserted heterologous amino acid or heterologous polypeptide. In some cases, a Cas9 fusion polypeptide of the present disclosure comprises: (a) a Cas9 polypeptide; and (b) a heterologous amino acid or heterologous polypeptide inserted internally within the Cas9 polypeptide, wherein the heterologous amino acid or heterologous polypeptide is inserted at a position that is immediately adjacent and N-terminal to amino acid 1291 of the Cas9 protein set forth in SEQ ID NO:5, or a corresponding amino acid residue in another Cas9 polypeptide; and wherein the Cas9 fusion polypeptide retains cleavage and/or binding activity relative to the activity of the Cas9 polypeptide without the inserted heterologous amino acid or heterologous polypeptide. In some cases, the heterologous amino acid or heterologous polypeptide is inserted between residues 1290-1291, or between residues 1291-1292, of the Cas9 protein set forth in SEQ ID NO:5, or a corresponding amino acid residue in another Cas9 polypeptide.

[0213] In some cases, a Cas9 fusion polypeptide of the present disclosure comprises: (a) a Cas9 polypeptide; and (b) a heterologous amino acid or heterologous polypeptide inserted internally within the Cas9 polypeptide, wherein the heterologous amino acid or heterologous polypeptide is inserted at a position that is immediately adjacent and C-terminal to amino acid 1292 of the Cas9 protein set forth in SEQ ID NO:5, or a corresponding amino acid residue in another Cas9 polypeptide; and wherein the Cas9 fusion polypeptide retains cleavage and/or binding activity relative to the activity of the Cas9 polypeptide without the inserted heterologous amino acid or heterologous polypeptide. In some cases, a Cas9 fusion polypeptide of the present disclosure comprises: (a) a Cas9 polypeptide; and (b) a heterologous amino acid or heterologous polypeptide inserted internally within the Cas9 polypeptide, wherein the heterologous amino acid or heterologous polypeptide is inserted at a position that is immediately adjacent and N-terminal to amino acid 1292 of the Cas9 protein set forth in SEQ ID NO:5, or a corresponding amino acid residue in another Cas9 polypeptide; and wherein the Cas9 fusion polypeptide retains cleavage and/or binding activity relative to the activity of the Cas9 polypeptide without the inserted heterologous amino acid or heterologous polypeptide. In some cases, the heterologous amino acid or heterologous polypeptide is inserted between residues 1291-1292, or between residues 1292-1293, of the Cas9 protein set forth in SEQ ID NO:5, or a corresponding amino acid residue in another Cas9 polypeptide.

[0214] In some cases, a Cas9 fusion polypeptide of the present disclosure comprises: (a) a Cas9 polypeptide; and (b) a heterologous amino acid or heterologous polypeptide inserted internally within the Cas9 polypeptide, wherein the heterologous amino acid or heterologous polypeptide is inserted at a position that is immediately adjacent and C-terminal to amino acid 1293 of the Cas9 protein set forth in SEQ ID NO:5, or a corresponding amino acid residue in another Cas9 polypeptide; and wherein the Cas9 fusion polypeptide retains cleavage and/or binding activity relative to the activity of the Cas9 polypeptide without the inserted heterologous amino acid or heterologous polypeptide. In some cases, a Cas9 fusion polypeptide of the present disclosure comprises: (a) a Cas9 polypeptide; and (b) a heterologous amino acid or heterologous polypeptide inserted internally within the Cas9 polypeptide, wherein the heterologous amino acid or heterologous polypeptide is inserted at a position that is immediately adjacent and N-terminal to amino acid 1293 of the Cas9 protein set forth in SEQ ID NO:5, or a corresponding amino acid residue in another Cas9 polypeptide; and wherein the Cas9 fusion polypeptide retains cleavage and/or binding activity relative to the activity of the Cas9 polypeptide without the inserted heterologous amino acid or heterologous polypeptide. In some cases, the heterologous amino acid or heterologous polypeptide is inserted between residues 1292-1293, or between residues 1293-1294, of the Cas9 protein set forth in SEQ ID NO:5, or a corresponding amino acid residue in another Cas9 polypeptide.

[0215] In some cases, a Cas9 fusion polypeptide of the present disclosure comprises: (a) a Cas9 polypeptide; and (b) a heterologous amino acid or heterologous polypeptide inserted internally within the Cas9 polypeptide, wherein the heterologous amino acid or heterologous polypeptide is inserted at a position that is immediately adjacent and C-terminal to amino acid 1294 of the Cas9 protein set forth in SEQ ID NO:5, or a corresponding amino acid residue in another Cas9 polypeptide; and wherein the Cas9 fusion polypeptide retains cleavage and/or binding activity relative to the activity of the Cas9 polypeptide without the inserted heterologous amino acid or heterologous polypeptide. In some cases, a Cas9 fusion polypeptide of the present disclosure comprises: (a) a Cas9 polypeptide; and (b) a heterologous amino acid or heterologous polypeptide inserted internally within the Cas9 polypeptide, wherein the heterologous amino acid or heterologous polypeptide is inserted at a position that is immediately adjacent and N-terminal to amino acid 1294 of the Cas9 protein set forth in SEQ ID NO:5, or a corresponding amino acid residue in another Cas9 polypeptide; and wherein the Cas9 fusion polypeptide retains cleavage and/or binding activity relative to the activity of the Cas9 polypeptide without the inserted heterologous amino acid or heterologous polypeptide. In some cases, the heterologous amino acid or heterologous polypeptide is inserted between residues 1293-1294, or between residues 1294-1295, of the Cas9 protein set forth in SEQ ID NO:5, or a corresponding amino acid residue in another Cas9 polypeptide.

[0216] In some cases, a Cas9 fusion polypeptide of the present disclosure comprises: (a) a Cas9 polypeptide; and (b) a heterologous amino acid or heterologous polypeptide inserted internally within the Cas9 polypeptide, wherein the heterologous amino acid or heterologous polypeptide is inserted at a position that is immediately adjacent and C-terminal to amino acid 1295 of the Cas9 protein set forth in SEQ ID NO:5, or a corresponding amino acid residue in another Cas9 polypeptide; and wherein the Cas9 fusion polypeptide retains cleavage and/or binding activity relative to the activity of the Cas9 polypeptide without the inserted heterologous amino acid or heterologous polypeptide. In some cases, a Cas9 fusion polypeptide of the present disclosure comprises: (a) a Cas9 polypeptide; and (b) a heterologous amino acid or heterologous polypeptide inserted internally within the Cas9 polypeptide, wherein the heterologous amino acid or heterologous polypeptide is inserted at a position that is immediately adjacent and N-terminal to amino acid 1295 of the Cas9 protein set forth in SEQ ID NO:5, or a corresponding amino acid residue in another Cas9 polypeptide; and wherein the Cas9 fusion polypeptide retains cleavage and/or binding activity relative to the activity of the Cas9 polypeptide without the inserted heterologous amino acid or heterologous polypeptide. In some cases, the heterologous amino acid or heterologous polypeptide is inserted between residues 1294-1295, or between residues 1295-1296, of the Cas9 protein set forth in SEQ ID NO:5, or a corresponding amino acid residue in another Cas9 polypeptide.

[0217] In some cases, a Cas9 fusion polypeptide of the present disclosure comprises: (a) a Cas9 polypeptide; and (b) a heterologous amino acid or heterologous polypeptide inserted internally within the Cas9 polypeptide, wherein the heterologous amino acid or heterologous polypeptide is inserted at a position that is immediately adjacent and C-terminal to amino acid 1296 of the Cas9 protein set forth in SEQ ID NO:5, or a corresponding amino acid residue in another Cas9 polypeptide; and wherein the Cas9 fusion polypeptide retains cleavage and/or binding activity relative to the activity of the Cas9 polypeptide without the inserted heterologous amino acid or heterologous polypeptide. In some cases, a Cas9 fusion polypeptide of the present disclosure comprises: (a) a Cas9 polypeptide; and (b) a heterologous amino acid or heterologous polypeptide inserted internally within the Cas9 polypeptide, wherein the heterologous amino acid or heterologous polypeptide is inserted at a position that is immediately adjacent and N-terminal to amino acid 1296 of the Cas9 protein set forth in SEQ ID NO:5, or a corresponding amino acid residue in another Cas9 polypeptide; and wherein the Cas9 fusion polypeptide retains cleavage and/or binding activity relative to the activity of the Cas9 polypeptide without the inserted heterologous amino acid or heterologous polypeptide. In some cases, the heterologous amino acid or heterologous polypeptide is inserted between residues 1295-1296, or between residues 1296-1297, of the Cas9 protein set forth in SEQ ID NO:5, or a corresponding amino acid residue in another Cas9 polypeptide.

[0218] In some cases, a Cas9 fusion polypeptide of the present disclosure comprises: (a) a Cas9 polypeptide; and (b) a heterologous amino acid or heterologous polypeptide inserted internally within the Cas9 polypeptide, wherein the heterologous amino acid or heterologous polypeptide is inserted at a position that is immediately adjacent and C-terminal to amino acid 1298 of the Cas9 protein set forth in SEQ ID NO:5, or a corresponding amino acid residue in another Cas9 polypeptide; and wherein the Cas9 fusion polypeptide retains cleavage and/or binding activity relative to the activity of the Cas9 polypeptide without the inserted heterologous amino acid or heterologous polypeptide. In some cases, a Cas9 fusion polypeptide of the present disclosure comprises: (a) a Cas9 polypeptide; and (b) a heterologous amino acid or heterologous polypeptide inserted internally within the Cas9 polypeptide, wherein the heterologous amino acid or heterologous polypeptide is inserted at a position that is immediately adjacent and N-terminal to amino acid 1298 of the Cas9 protein set forth in SEQ ID NO:5, or a corresponding amino acid residue in another Cas9 polypeptide; and wherein the Cas9 fusion polypeptide retains cleavage and/or binding activity relative to the activity of the Cas9 polypeptide without the inserted heterologous amino acid or heterologous polypeptide. In some cases, the heterologous amino acid or heterologous polypeptide is inserted between residues 1297-1298, or between residues 1298-1299, of the Cas9 protein set forth in SEQ ID NO:5, or a corresponding amino acid residue in another Cas9 polypeptide.

[0219] In some cases, a Cas9 fusion polypeptide of the present disclosure comprises: (a) a Cas9 polypeptide; and (b) a heterologous amino acid or heterologous polypeptide inserted internally within the Cas9 polypeptide, wherein the heterologous amino acid or heterologous polypeptide is inserted at a position that is immediately adjacent and C-terminal to amino acid 1299 of the Cas9 protein set forth in SEQ ID NO:5, or a corresponding amino acid residue in another Cas9 polypeptide; and wherein the Cas9 fusion polypeptide retains cleavage and/or binding activity relative to the activity of the Cas9 polypeptide without the inserted heterologous amino acid or heterologous polypeptide. In some cases, a Cas9 fusion polypeptide of the present disclosure comprises: (a) a Cas9 polypeptide; and (b) a heterologous amino acid or heterologous polypeptide inserted internally within the Cas9 polypeptide, wherein the heterologous amino acid or heterologous polypeptide is inserted at a position that is immediately adjacent and N-terminal to amino acid 1299 of the Cas9 protein set forth in SEQ ID NO:5, or a corresponding amino acid residue in another Cas9 polypeptide; and wherein the Cas9 fusion polypeptide retains cleavage and/or binding activity relative to the activity of the Cas9 polypeptide without the inserted heterologous amino acid or heterologous polypeptide. In some cases, the heterologous amino acid or heterologous polypeptide is inserted between residues 1298-1299, or between residues 1299-1300, of the Cas9 protein set forth in SEQ ID NO:5, or a corresponding amino acid residue in another Cas9 polypeptide.

[0220] In some cases, a Cas9 fusion polypeptide of the present disclosure comprises: (a) a Cas9 polypeptide; and (b) a heterologous amino acid or heterologous polypeptide inserted internally within the Cas9 polypeptide, wherein the heterologous amino acid or heterologous polypeptide is inserted at a position that is immediately adjacent and C-terminal to amino acid 1300 of the Cas9 protein set forth in SEQ ID NO:5, or a corresponding amino acid residue in another Cas9 polypeptide; and wherein the Cas9 fusion polypeptide retains cleavage and/or binding activity relative to the activity of the Cas9 polypeptide without the inserted heterologous amino acid or heterologous polypeptide. In some cases, a Cas9 fusion polypeptide of the present disclosure comprises: (a) a Cas9 polypeptide; and (b) a heterologous amino acid or heterologous polypeptide inserted internally within the Cas9 polypeptide, wherein the heterologous amino acid or heterologous polypeptide is inserted at a position that is immediately adjacent and N-terminal to amino acid 1300 of the Cas9 protein set forth in SEQ ID NO:5, or a corresponding amino acid residue in another Cas9 polypeptide; and wherein the Cas9 fusion polypeptide retains cleavage and/or binding activity relative to the activity of the Cas9 polypeptide without the inserted heterologous amino acid or heterologous polypeptide. In some cases, the heterologous amino acid or heterologous polypeptide is inserted between residues 1299-1300, or between residues 1300-1301, of the Cas9 protein set forth in SEQ ID NO:5, or a corresponding amino acid residue in another Cas9 polypeptide.

[0221] In some cases, a Cas9 fusion polypeptide of the present disclosure comprises: (a) a Cas9 polypeptide; and (b) a heterologous amino acid or heterologous polypeptide inserted internally within the Cas9 polypeptide, wherein the heterologous amino acid or heterologous polypeptide is inserted at a position that is immediately adjacent and C-terminal to amino acid 1302 of the Cas9 protein set forth in SEQ ID NO:5, or a corresponding amino acid residue in another Cas9 polypeptide; and wherein the Cas9 fusion polypeptide retains cleavage and/or binding activity relative to the activity of the Cas9 polypeptide without the inserted heterologous amino acid or heterologous polypeptide. In some cases, a Cas9 fusion polypeptide of the present disclosure comprises: (a) a Cas9 polypeptide; and (b) a heterologous amino acid or heterologous polypeptide inserted internally within the Cas9 polypeptide, wherein the heterologous amino acid or heterologous polypeptide is inserted at a position that is immediately adjacent and N-terminal to amino acid 1302 of the Cas9 protein set forth in SEQ ID NO:5, or a corresponding amino acid residue in another Cas9 polypeptide; and wherein the Cas9 fusion polypeptide retains cleavage and/or binding activity relative to the activity of the Cas9 polypeptide without the inserted heterologous amino acid or heterologous polypeptide. In some cases, the heterologous amino acid or heterologous polypeptide is inserted between residues 1301-1302, or between residues 1302-1303, of the Cas9 protein set forth in SEQ ID NO:5, or a corresponding amino acid residue in another Cas9 polypeptide.

[0222] In some cases, a Cas9 fusion polypeptide of the present disclosure comprises: (a) a Cas9 polypeptide; and (b) a heterologous amino acid or heterologous polypeptide inserted internally within the Cas9 polypeptide, wherein the heterologous amino acid or heterologous polypeptide is inserted at a position that is immediately adjacent and C-terminal to amino acid 1304 of the Cas9 protein set forth in SEQ ID NO:5, or a corresponding amino acid residue in another Cas9 polypeptide; and wherein the Cas9 fusion polypeptide retains cleavage and/or binding activity relative to the activity of the Cas9 polypeptide without the inserted heterologous amino acid or heterologous polypeptide. In some cases, a Cas9 fusion polypeptide of the present disclosure comprises: (a) a Cas9 polypeptide; and (b) a heterologous amino acid or heterologous polypeptide inserted internally within the Cas9 polypeptide, wherein the heterologous amino acid or heterologous polypeptide is inserted at a position that is immediately adjacent and N-terminal to amino acid 1304 of the Cas9 protein set forth in SEQ ID NO:5, or a corresponding amino acid residue in another Cas9 polypeptide; and wherein the Cas9 fusion polypeptide retains cleavage and/or binding activity relative to the activity of the Cas9 polypeptide without the inserted heterologous amino acid or heterologous polypeptide. In some cases, the heterologous amino acid or heterologous polypeptide is inserted between residues 1303-1304, or between residues 1304-1305, of the Cas9 protein set forth in SEQ ID NO:5, or a corresponding amino acid residue in another Cas9 polypeptide.

[0223] In some cases, a Cas9 fusion polypeptide of the present disclosure comprises: (a) a Cas9 polypeptide; and (b) a heterologous amino acid or heterologous polypeptide inserted internally within the Cas9 polypeptide, wherein the heterologous amino acid or heterologous polypeptide is inserted at a position that is immediately adjacent and C-terminal to amino acid 1306 of the Cas9 protein set forth in SEQ ID NO:5, or a corresponding amino acid residue in another Cas9 polypeptide; and wherein the Cas9 fusion polypeptide retains cleavage and/or binding activity relative to the activity of the Cas9 polypeptide without the inserted heterologous amino acid or heterologous polypeptide. In some cases, a Cas9 fusion polypeptide of the present disclosure comprises: (a) a Cas9 polypeptide; and (b) a heterologous amino acid or heterologous polypeptide inserted internally within the Cas9 polypeptide, wherein the heterologous amino acid or heterologous polypeptide is inserted at a position that is immediately adjacent and N-terminal to amino acid 1306 of the Cas9 protein set forth in SEQ ID NO:5, or a corresponding amino acid residue in another Cas9 polypeptide; and wherein the Cas9 fusion polypeptide retains cleavage and/or binding activity relative to the activity of the Cas9 polypeptide without the inserted heterologous amino acid or heterologous polypeptide. In some cases, the heterologous amino acid or heterologous polypeptide is inserted between residues 1305-1306, or between residues 1306-1307, of the Cas9 protein set forth in SEQ ID NO:5, or a corresponding amino acid residue in another Cas9 polypeptide.

[0224] In some cases, a Cas9 fusion polypeptide of the present disclosure comprises: (a) a Cas9 polypeptide; and (b) a heterologous amino acid or heterologous polypeptide inserted internally within the Cas9 polypeptide, wherein the heterologous amino acid or heterologous polypeptide is inserted at a position that is immediately adjacent and C-terminal to amino acid 1307 of the Cas9 protein set forth in SEQ ID NO:5, or a corresponding amino acid residue in another Cas9 polypeptide; and wherein the Cas9 fusion polypeptide retains cleavage and/or binding activity relative to the activity of the Cas9 polypeptide without the inserted heterologous amino acid or heterologous polypeptide. In some cases, a Cas9 fusion polypeptide of the present disclosure comprises: (a) a Cas9 polypeptide; and (b) a heterologous amino acid or heterologous polypeptide inserted internally within the Cas9 polypeptide, wherein the heterologous amino acid or heterologous polypeptide is inserted at a position that is immediately adjacent and N-terminal to amino acid 1307 of the Cas9 protein set forth in SEQ ID NO:5, or a corresponding amino acid residue in another Cas9 polypeptide; and wherein the Cas9 fusion polypeptide retains cleavage and/or binding activity relative to the activity of the Cas9 polypeptide without the inserted heterologous amino acid or heterologous polypeptide. In some cases, the heterologous amino acid or heterologous polypeptide is inserted between residues 1306-1307, or between residues 1307-1308, of the Cas9 protein set forth in SEQ ID NO:5, or a corresponding amino acid residue in another Cas9 polypeptide.

[0225] In some cases, a Cas9 fusion polypeptide of the present disclosure comprises: (a) a Cas9 polypeptide; and (b) a heterologous amino acid or heterologous polypeptide inserted internally within the Cas9 polypeptide, wherein the heterologous amino acid or heterologous polypeptide is inserted at a position that is immediately adjacent and C-terminal to amino acid 1344 of the Cas9 protein set forth in SEQ ID NO:5, or a corresponding amino acid residue in another Cas9 polypeptide; and wherein the Cas9 fusion polypeptide retains cleavage and/or binding activity relative to the activity of the Cas9 polypeptide without the inserted heterologous amino acid or heterologous polypeptide. In some cases, a Cas9 fusion polypeptide of the present disclosure comprises: (a) a Cas9 polypeptide; and (b) a heterologous amino acid or heterologous polypeptide inserted internally within the Cas9 polypeptide, wherein the heterologous amino acid or heterologous polypeptide is inserted at a position that is immediately adjacent and N-terminal to amino acid 1344 of the Cas9 protein set forth in SEQ ID NO:5, or a corresponding amino acid residue in another Cas9 polypeptide; and wherein the Cas9 fusion polypeptide retains cleavage and/or binding activity relative to the activity of the Cas9 polypeptide without the inserted heterologous amino acid or heterologous polypeptide. In some cases, the heterologous amino acid or heterologous polypeptide is inserted between residues 1343-1344, or between residues 1344-1345, of the Cas9 protein set forth in SEQ ID NO:5, or a corresponding amino acid residue in another Cas9 polypeptide.

[0226] In some cases, a Cas9 fusion polypeptide of the present disclosure comprises: (a) a Cas9 polypeptide; and (b) a heterologous amino acid or heterologous polypeptide inserted internally within the Cas9 polypeptide, wherein the heterologous amino acid or heterologous polypeptide is inserted at a position that is immediately adjacent and C-terminal to amino acid 1346 of the Cas9 protein set forth in SEQ ID NO:5, or a corresponding amino acid residue in another Cas9 polypeptide; and wherein the Cas9 fusion polypeptide retains cleavage and/or binding activity relative to the activity of the Cas9 polypeptide without the inserted heterologous amino acid or heterologous polypeptide. In some cases, a Cas9 fusion polypeptide of the present disclosure comprises: (a) a Cas9 polypeptide; and (b) a heterologous amino acid or heterologous polypeptide inserted internally within the Cas9 polypeptide, wherein the heterologous amino acid or heterologous polypeptide is inserted at a position that is immediately adjacent and N-terminal to amino acid 1346 of the Cas9 protein set forth in SEQ ID NO:5, or a corresponding amino acid residue in another Cas9 polypeptide; and wherein the Cas9 fusion polypeptide retains cleavage and/or binding activity relative to the activity of the Cas9 polypeptide without the inserted heterologous amino acid or heterologous polypeptide. In some cases, the heterologous amino acid or heterologous polypeptide is inserted between residues 1345-1346, or between residues 1346-1347, of the Cas9 protein set forth in SEQ ID NO:5, or a corresponding amino acid residue in another Cas9 polypeptide.

[0227] In some cases, a Cas9 fusion polypeptide of the present disclosure comprises: (a) a Cas9 polypeptide; and (b) a heterologous amino acid or heterologous polypeptide inserted internally within the Cas9 polypeptide, wherein the heterologous amino acid or heterologous polypeptide is inserted at a position that is immediately adjacent and C-terminal to amino acid 1347 of the Cas9 protein set forth in SEQ ID NO:5, or a corresponding amino acid residue in another Cas9 polypeptide; and wherein the Cas9 fusion polypeptide retains cleavage and/or binding activity relative to the activity of the Cas9 polypeptide without the inserted heterologous amino acid or heterologous polypeptide. In some cases, a Cas9 fusion polypeptide of the present disclosure comprises: (a) a Cas9 polypeptide; and (b) a heterologous amino acid or heterologous polypeptide inserted internally within the Cas9 polypeptide, wherein the heterologous amino acid or heterologous polypeptide is inserted at a position that is immediately adjacent and N-terminal to amino acid 1347 of the Cas9 protein set forth in SEQ ID NO:5, or a corresponding amino acid residue in another Cas9 polypeptide; and wherein the Cas9 fusion polypeptide retains cleavage and/or binding activity relative to the activity of the Cas9 polypeptide without the inserted heterologous amino acid or heterologous polypeptide. In some cases, the heterologous amino acid or heterologous polypeptide is inserted between residues 1346-1347, or between residues 1347-1348, of the Cas9 protein set forth in SEQ ID NO:5, or a corresponding amino acid residue in another Cas9 polypeptide.

[0228] In some cases, a Cas9 fusion polypeptide of the present disclosure comprises: (a) a Cas9 polypeptide; and (b) a heterologous amino acid or heterologous polypeptide inserted internally within the Cas9 polypeptide, wherein the heterologous amino acid or heterologous polypeptide is inserted at a position that is immediately adjacent and C-terminal to amino acid 1348 of the Cas9 protein set forth in SEQ ID NO:5, or a corresponding amino acid residue in another Cas9 polypeptide; and wherein the Cas9 fusion polypeptide retains cleavage and/or binding activity relative to the activity of the Cas9 polypeptide without the inserted heterologous amino acid or heterologous polypeptide. In some cases, a Cas9 fusion polypeptide of the present disclosure comprises: (a) a Cas9 polypeptide; and (b) a heterologous amino acid or heterologous polypeptide inserted internally within the Cas9 polypeptide, wherein the heterologous amino acid or heterologous polypeptide is inserted at a position that is immediately adjacent and N-terminal to amino acid 1348 of the Cas9 protein set forth in SEQ ID NO:5, or a corresponding amino acid residue in another Cas9 polypeptide; and wherein the Cas9 fusion polypeptide retains cleavage and/or binding activity relative to the activity of the Cas9 polypeptide without the inserted heterologous amino acid or heterologous polypeptide. In some cases, the heterologous amino acid or heterologous polypeptide is inserted between residues 1347-1348, or between residues 1348-1349, of the Cas9 protein set forth in SEQ ID NO:5, or a corresponding amino acid residue in another Cas9 polypeptide.

[0229] In some cases, a Cas9 fusion polypeptide of the present disclosure comprises: (a) a Cas9 polypeptide; and (b) a heterologous amino acid or heterologous polypeptide inserted internally within the Cas9 polypeptide, wherein the heterologous amino acid or heterologous polypeptide is inserted at a position that is immediately adjacent and C-terminal to amino acid 1360 of the Cas9 protein set forth in SEQ ID NO:5, or a corresponding amino acid residue in another Cas9 polypeptide; and wherein the Cas9 fusion polypeptide retains cleavage and/or binding activity relative to the activity of the Cas9 polypeptide without the inserted heterologous amino acid or heterologous polypeptide. In some cases, a Cas9 fusion polypeptide of the present disclosure comprises: (a) a Cas9 polypeptide; and (b) a heterologous amino acid or heterologous polypeptide inserted internally within the Cas9 polypeptide, wherein the heterologous amino acid or heterologous polypeptide is inserted at a position that is immediately adjacent and N-terminal to amino acid 1360 of the Cas9 protein set forth in SEQ ID NO:5, or a corresponding amino acid residue in another Cas9 polypeptide; and wherein the Cas9 fusion polypeptide retains cleavage and/or binding activity relative to the activity of the Cas9 polypeptide without the inserted heterologous amino acid or heterologous polypeptide. In some cases, the heterologous amino acid or heterologous polypeptide is inserted between residues 1359-1360, or between residues 1360-1361, of the Cas9 protein set forth in SEQ ID NO:5, or a corresponding amino acid residue in another Cas9 polypeptide.

[0230] In some cases, a Cas9 fusion polypeptide of the present disclosure comprises: (a) a Cas9 polypeptide; and (b) a heterologous amino acid or heterologous polypeptide inserted internally within the Cas9 polypeptide, wherein the heterologous amino acid or heterologous polypeptide is inserted at a position that is immediately adjacent and C-terminal to amino acid 1363 of the Cas9 protein set forth in SEQ ID NO:5, or a corresponding amino acid residue in another Cas9 polypeptide; and wherein the Cas9 fusion polypeptide retains cleavage and/or binding activity relative to the activity of the Cas9 polypeptide without the inserted heterologous amino acid or heterologous polypeptide. In some cases, a Cas9 fusion polypeptide of the present disclosure comprises: (a) a Cas9 polypeptide; and (b) a heterologous amino acid or heterologous polypeptide inserted internally within the Cas9 polypeptide, wherein the heterologous amino acid or heterologous polypeptide is inserted at a position that is immediately adjacent and N-terminal to amino acid 1363 of the Cas9 protein set forth in SEQ ID NO:5, or a corresponding amino acid residue in another Cas9 polypeptide; and wherein the Cas9 fusion polypeptide retains cleavage and/or binding activity relative to the activity of the Cas9 polypeptide without the inserted heterologous amino acid or heterologous polypeptide. In some cases, the heterologous amino acid or heterologous polypeptide is inserted between residues 1363-1363, or between residues 1363-1364, of the Cas9 protein set forth in SEQ ID NO:5, or a corresponding amino acid residue in another Cas9 polypeptide.

[0231] In some cases, a Cas9 fusion polypeptide of the present disclosure comprises: (a) a Cas9 polypeptide; and (b) a heterologous amino acid or heterologous polypeptide inserted internally within the Cas9 polypeptide, wherein the heterologous amino acid or heterologous polypeptide is inserted at a position that is immediately adjacent and C-terminal to amino acid 1366 of the Cas9 protein set forth in SEQ ID NO:5, or a corresponding amino acid residue in another Cas9 polypeptide; and wherein the Cas9 fusion polypeptide retains cleavage and/or binding activity relative to the activity of the Cas9 polypeptide without the inserted heterologous amino acid or heterologous polypeptide. In some cases, a Cas9 fusion polypeptide of the present disclosure comprises: (a) a Cas9 polypeptide; and (b) a heterologous amino acid or heterologous polypeptide inserted internally within the Cas9 polypeptide, wherein the heterologous amino acid or heterologous polypeptide is inserted at a position that is immediately adjacent and N-terminal to amino acid 1366 of the Cas9 protein set forth in SEQ ID NO:5, or a corresponding amino acid residue in another Cas9 polypeptide; and wherein the Cas9 fusion polypeptide retains cleavage and/or binding activity relative to the activity of the Cas9 polypeptide without the inserted heterologous amino acid or heterologous polypeptide. In some cases, the heterologous amino acid or heterologous polypeptide is inserted between residues 1365-1366, or between residues 1366-1367, of the Cas9 protein set forth in SEQ ID NO:5, or a corresponding amino acid residue in another Cas9 polypeptide.

[0232] In some cases, a Cas9 fusion polypeptide of the present disclosure comprises: (a) a Cas9 polypeptide; and (b) a heterologous amino acid or heterologous polypeptide inserted internally within the Cas9 polypeptide, wherein the heterologous amino acid or heterologous polypeptide is inserted at a position that is immediately adjacent and C-terminal to amino acid 1367 of the Cas9 protein set forth in SEQ ID NO:5, or a corresponding amino acid residue in another Cas9 polypeptide; and wherein the Cas9 fusion polypeptide retains cleavage and/or binding activity relative to the activity of the Cas9 polypeptide without the inserted heterologous amino acid or heterologous polypeptide. In some cases, a Cas9 fusion polypeptide of the present disclosure comprises: (a) a Cas9 polypeptide; and (b) a heterologous amino acid or heterologous polypeptide inserted internally within the Cas9 polypeptide, wherein the heterologous amino acid or heterologous polypeptide is inserted at a position that is immediately adjacent and C-terminal to amino acid 1367 of the Cas9 protein set forth in SEQ ID NO:5, or a corresponding amino acid residue in another Cas9 polypeptide; and wherein the Cas9 fusion polypeptide retains cleavage and/or binding activity relative to the activity of the Cas9 polypeptide without the inserted heterologous amino acid or heterologous polypeptide. In some cases, the heterologous amino acid or heterologous polypeptide is inserted between residues 1366-1367, or between residues 1367-1368, of the Cas9 protein set forth in SEQ ID NO:5, or a corresponding amino acid residue in another Cas9 polypeptide.

[0233] As noted at the bottom of FIG. 20C, in some cases, the last amino acid of the Cas9 sequence flanking the heterologous peptide at the N-terminal end is mutated upon insertion of the heterologous polypeptide. As an illustrative example, in the case depicted in FIG. 22B, there is a Q to H amino acid substitution at position 1027. In this case, the insert site is referred to as 1027 despite the presence of the mutation. Refer to FIG. 22B for an illustrative example.

### Cas9 Polypeptide

TABLE 3
Table 3 lists 4 motifs that are present in Cas9 sequences
from various species. The amino acids listed here are from
the Cas9 from S. pyogenes set forth in SEQ ID NO: 5.

| Motif # | Motif | Amino acids (residue #s) | Highly conserved |
|---|---|---|---|
| 1 | RuvC-like I | AGLDIGTNSVGWAVI (7-21) | D10, G12, G17 |
| | | (SEQ ID NO: 1) | |
| 2 | RuvC-like II | IVIEMARE (759-766) | E762 |
| | | (SEQ ID NO: 2) | |
| 3 | HNH-motif | DVDHIVPQSFLKDDSIDNKVLTRSDKN | H840, N854, N863 |
| | | (837-863) (SEQ ID NO: 3) | |
| 4 | RuvC-like II | HHAHDAYL (982-989) | H982, H983, A984, |
| | | (SEQ ID NO: 4) | D986, A987 |

[0235] A variant Cas9 protein can have the same parameters for sequence identity as for a wild type Cas9 protein (except the variant has at least one sequence difference relative to a wild type Cas9 protein). Thus, in some cases, a suitable variant Cas9 protein comprises an amino acid sequence having 4 motifs, each of motifs 1-4 having 60% or more, 70% or more, 75% or more, 80% or more, 85% or more, 90% or more, 95% or more, 99% or more or 100% amino acid sequence identity to motifs 1-4 of the Cas9 amino acid sequence set forth in SEQ ID NOs: 1-4, respectively, as depicted in Table 3, or to the corresponding portions in any of the amino acid sequences set forth in SEQ ID NOs: 5-816.

[0236] In some cases, a suitable variant Cas9 protein comprises an amino acid sequence having 4 motifs, each of motifs 1-4 having 60% or more amino acid sequence identity to motifs 1-4 of the Cas9 amino acid sequence set forth as SEQ ID NO: 5 (the motifs are in Table 3 and are set forth as SEQ ID NOs: 1-4, respectively), or to the corresponding portions in any of the amino acid sequences set forth in SEQ ID NOs: 6-816.

[0237] In some cases, a suitable variant Cas9 protein comprises an amino acid sequence having 4 motifs, each of motifs 1-4 having 70% or more amino acid sequence identity to motifs 1-4 of the Cas9 amino acid sequence set forth as SEQ ID NO: 5 (the motifs are in Table 3 and are set forth as SEQ ID NOs: 1-4, respectively), or to the corresponding portions in any of the amino acid sequences set forth in SEQ ID NOs: 6-816.

[0238] In some cases, a suitable variant Cas9 protein comprises an amino acid sequence having 4 motifs, each of motifs 1-4 having 75% or more amino acid sequence identity to motifs 1-4 of the Cas9 amino acid sequence set forth as SEQ ID NO: 5 (the motifs are in Table 3 and are set forth as SEQ ID NOs: 1-4, respectively), or to the corresponding portions in any of the amino acid sequences set forth in SEQ ID NOs: 6-816.

[0239] In some cases, a suitable variant Cas9 protein comprises an amino acid sequence having 4 motifs, each of motifs 1-4 having 80% or more amino acid sequence identity to motifs 1-4 of the Cas9 amino acid sequence set forth as SEQ ID NO: 5 (the motifs are in Table 3 and are set forth as SEQ ID NOs: 1-4, respectively), or to the corresponding portions in any of the amino acid sequences set forth in SEQ ID NOs: 6-816.

[0240] In some cases, a suitable variant Cas9 protein comprises an amino acid sequence having 4 motifs, each of motifs 1-4 having 85% or more amino acid sequence identity to motifs 1-4 of the Cas9 amino acid sequence set forth as SEQ ID NO: 5 (the motifs are in Table 3 and are set forth as SEQ ID NOs: 1-4, respectively), or to the corresponding portions in any of the amino acid sequences set forth in SEQ ID NOs: 6-816.

[0241] In some cases, a suitable variant Cas9 protein comprises an amino acid sequence having 4 motifs, each of motifs 1-4 having 90% or more amino acid sequence identity to motifs 1-4 of the Cas9 amino acid sequence set forth as SEQ ID NO: 5 (the motifs are in Table 3 and are set forth as SEQ ID NOs: 1-4, respectively), or to the corresponding portions in any of the amino acid sequences set forth in SEQ ID NOs: 6-816.

[0242] In some cases, a suitable variant Cas9 protein comprises an amino acid sequence having 4 motifs, each of motifs 1-4 having 95% or more amino acid sequence identity to motifs 1-4 of the Cas9 amino acid sequence set forth as SEQ ID NO: 5 (the motifs are in Table 3 and are set forth as SEQ ID NOs: 1-4, respectively), or to the corresponding portions in any of the amino acid sequences set forth in SEQ ID NOs: 6-816.

[0243] In some cases, a suitable variant Cas9 protein comprises an amino acid sequence having 4 motifs, each of motifs 1-4 having 99% or more amino acid sequence identity to motifs 1-4 of the Cas9 amino acid sequence set forth as SEQ ID NO: 5 (the motifs are in Table 3 and are set forth as SEQ ID NOs: 1-4, respectively), or to the corresponding portions in any of the amino acid sequences set forth in SEQ ID NOs: 6-816.

[0244] In some cases, a suitable variant Cas9 protein comprises an amino acid sequence having 4 motifs, each of motifs 1-4 having 100% amino acid sequence identity to motifs 1-4 of the Cas9 amino acid sequence set forth as SEQ ID NO: 5 (the motifs are in Table 3 and are set forth as SEQ ID NOs: 1-4, respectively), or to the corresponding portions in any of the amino acid sequences set forth in SEQ ID NOs: 6-816.

[0245] In some cases, a suitable variant Cas9 protein (e.g., the Cas9 polypeptide portion of a subject Cas9 fusion polypeptide) comprises an amino acid sequence having 60% or more, 70% or more, 75% or more, 80% or more, 85% or more, 90% or more, 95% or more, or 99% or more sequence identity to the Cas9 amino acid sequence set forth in SEQ ID NO: 5, or to any of the amino acid sequences set forth as SEQ ID NOs: 6-816.

[0246] In some cases, a suitable variant Cas9 protein comprises an amino acid sequence having 60% or more amino acid sequence identity to the Cas9 amino acid sequence set forth in SEQ ID NO: 5, or to any of the amino acid sequences set forth as SEQ ID NOs: 6-816.

[0247] In some cases, a suitable variant Cas9 protein comprises an amino acid sequence having 70% or more amino acid sequence identity to the Cas9 amino acid sequence set forth in SEQ ID NO: 5, or to any of the amino acid sequences set forth as SEQ ID NOs: 6-816.

[0248] In some cases, a suitable variant Cas9 protein comprises an amino acid sequence having 75% or more amino acid sequence identity to the Cas9 amino acid sequence set forth in SEQ ID NO: 5, or to any of the amino acid sequences set forth as SEQ ID NOs: 6-816.

[0249] In some cases, a suitable variant Cas9 protein comprises an amino acid sequence having 80% or more amino acid sequence identity to the Cas9 amino acid sequence set forth in SEQ ID NO: 5, or to any of the amino acid sequences set forth as SEQ ID NOs: 6-816.

[0250] In some cases, a suitable variant Cas9 protein comprises an amino acid sequence having 85% or more amino acid sequence identity to the Cas9 amino acid sequence set forth in SEQ ID NO: 5, or to any of the amino acid sequences set forth as SEQ ID NOs: 6-816.

[0251] In some cases, a suitable variant Cas9 protein comprises an amino acid sequence having 90% or more amino acid sequence identity to the Cas9 amino acid sequence set forth in SEQ ID NO: 5, or to any of the amino acid sequences set forth as SEQ ID NOs: 6-816.

[0252] In some cases, a suitable variant Cas9 protein comprises an amino acid sequence having 95% or more amino acid sequence identity to the Cas9 amino acid sequence set forth in SEQ ID NO: 5, or to any of the amino acid sequences set forth as SEQ ID NOs: 6-816.

[0253] In some cases, a suitable variant Cas9 protein comprises an amino acid sequence having 99% or more amino acid sequence identity to the Cas9 amino acid sequence set forth in SEQ ID NO: 5, or to any of the amino acid sequences set forth as SEQ ID NOs: 6-816.

[0254] Any Cas9 protein as defined above can be used as a Cas9 polypeptide portion of a subject Cas9 fusion polypeptide, and any Cas9 polypeptide portion described above can include one or more amino acid mutations that render the Cas9 polypeptide portion of a subject Cas9 fusion polypeptide to be a nickase or a catalytically inactive Cas9 protein.

[0255] In some embodiments, a subject Cas9 fusion polypeptide includes a Cas9 polypeptide portion that has reduced catalytic activity (e.g., a Cas9 protein with nickase activity or a Cas9 protein that is catalytically inactive, e.g., dCas9). For example, when a Cas9 protein has a mutation at an amino acid position corresponding to D10, G12, G17, E762, H840, N854, N863, H982, H983, A984, D986, and/or a A987 of the Cas9 protein set forth in SEQ ID NO: 5 (e.g., D10A, G12A, G17A, E762A, H840A, N854A, N863A, H982A, H983A, A984A, and/or D986A), the variant Cas9 protein can still bind to target DNA in a site-specific manner (because it is still guided to a target DNA sequence by a guide RNA) as long as it retains the ability to interact with the guide RNA.

[0256] In some cases, the variant Cas9 protein is a nickase (e.g., cleaves one strand of a double stranded target nucleic acid but not the other strand) (e.g., the Cas9 polypeptide portion of a subject Cas9 fusion polypeptide can be a nickase, e.g., can include one or more amino acid mutations that make it a nickase). For example, in some cases the variant Cas9 protein has a mutation in a catalytic domain (e.g., a mutation in a RuvC or HNH domain). For example, in some cases, a variant Cas9 protein can cleave the complementary strand of a target nucleic acid but has reduced ability to cleave the non-complementary strand of a target nucleic acid. For example, the variant Cas9 protein can have a mutation (amino acid substitution) that reduces the function of the RuvC domain. As a non-limiting example, in some embodiments, a variant Cas9 protein has a mutation at residue D10 (e.g., D10A, aspartate to alanine) of SEQ ID NO: 5 (or the corresponding position of any of the proteins set forth in SEQ ID NOs: 6-816) and can therefore cleave the complementary strand of a double stranded target nucleic acid but has reduced ability to cleave the non-complementary strand of a double stranded target nucleic acid (thus resulting in a single strand break (SSB) instead of a double strand break (DSB) when the variant Cas9 protein cleaves a double stranded target nucleic acid) (see, for example, Jinek et al., Science. 2012 Aug. 17; 337(6096):816-21). Examples of such amino acid positions in a RuvC domain can include (as depicted in Table 3): D10, G12, G17, E762, H982, H983, A984, D986, and/or A987 of the Cas9 protein set forth in SEQ ID NO: 5 (e.g., D10A, G12A, G17A, E762A, H982A, H983A, A984A, and/or D986A).

[0257] In some cases, a variant Cas9 protein is a nickase (e.g., cleaves one strand of a double stranded target nucleic acid but not the other strand (e.g., the Cas9 polypeptide portion of a subject Cas9 fusion polypeptide can be a nickase, e.g., can include one or more amino acid mutations that make it a nickase). For example, in some cases, a variant Cas9 protein can cleave the non-complementary strand of a target nucleic acid but has reduced ability to cleave the complementary strand of the target nucleic acid. For example, the variant Cas9 protein can have a mutation (amino acid substitution) that reduces the function of the HNH domain. Thus, the Cas9 protein can be a nickase that cleaves the non-complementary strand, but does not cleave the complementary strand (e.g., does not cleave a single stranded target nucleic acid). As a non-limiting example, in some embodiments, the variant Cas9 protein has a mutation at position H840 (e.g., an H840A mutation, histidine to alanine) of SEQ ID NO: 5 (or the corresponding position of any of the proteins set forth as SEQ ID NOs: 6-816, e.g., H839 (e.g., H839A) of SEQ ID NO: 6) and can therefore cleave the non-complementary strand of the target nucleic acid but has reduced ability to cleave (e.g., does not cleave) the complementary strand of the target nucleic acid. Such a Cas9 protein has a reduced ability to cleave a target nucleic acid (e.g., a single stranded target nucleic acid). Examples of such amino acid positions in an HNH domain can include (as depicted in Table 3): H840, N854, and/or N863 of the Cas9 protein set forth in SEQ ID NO: 5 (e.g., H840A, N854A, and/or N863A).

[0258] In some cases, a variant Cas9 protein has a reduced ability to cleave both the complementary and the non-complementary strands of a double stranded target nucleic acid. As a non-limiting example, in some cases, the variant Cas9 protein harbors mutations at residues D10 and H840 (e.g., D10A and H840A) of SEQ ID NO: 5 (or the corresponding residues of any of the proteins set forth as SEQ ID NOs: 6-816, e.g., D10 and H839 of SEQ ID NO: 6) such that the polypeptide has a reduced ability to cleave (e.g., does not cleave) both the complementary and the non-complementary strands of a target nucleic acid. Such a Cas9 protein has a reduced ability to cleave a target nucleic acid (e.g., a single stranded or double stranded target nucleic acid) but retains the ability to bind a target nucleic acid. For example, a variant Cas9 protein can have a mutation in one or more of amino acid positions in (i) a RuvC domain (as depicted in Table 3): D10, G12, G17, E762, H982, H983, A984, D986, and/or A987 of the Cas9 protein set forth in SEQ ID NO: 5 (e.g., D10A, G12A, G17A, E762A, H982A, H983A, A984A, and/or D986A); and one or more of amino acid positions in (ii) an HNH domain (as depicted in Table 3): H840, N854, and/or N863 of the Cas9 protein set forth in SEQ ID NO: 5 (e.g., H840A, N854A, and/or N863A).

### Insertion Sites

[0259] A heterologous polypeptide (or heterologous amino acid such as a cysteine residue or a non-natural amino acid) can be inserted at several positions within a Cas9 polypeptide to generate a subject Cas9 fusion polypeptide. For example, by insertional screening (i.e., insertion of a heterologous polypeptide at positions throughout a Cas9 protein), the inventors discovered several sites that tolerate insertions without substantially affecting the function of the Cas9 protein (e.g., without substantially affecting the cleaving of a target nucleic acid and/or the binding of a target nucleic acid).

[0260] In some cases, the Cas9 fusion polypeptide retains (has) activity (e.g., cleavage and/or binding activity) relative to the activity of the Cas9 polypeptide without the inserted heterologous amino acid or heterologous polypeptide, where the Cas9 polypeptide without the inserted heterologous amino acid or heterologous polypeptide is also referred to as the “parent Cas9 polypeptide.” For example, in some cases, the Cas9 fusion polypeptide has (retains) 50% or more of the activity (e.g., cleavage and/or binding activity) of the corresponding parent Cas9 polypeptide (the Cas9 polypeptide that does not have the insertion). For example, in some cases, the Cas9 fusion polypeptide has (retains) 60% or more (70% or more, 80% or more, 90% or more, 92% or more, 95% or more, 98% or more, or 100%) of the activity (e.g., cleavage and/or binding activity) of the corresponding parent Cas9 polypeptide (the Cas9 polypeptide that does not have the insertion).

[0261] In some cases, the Cas9 fusion polypeptide retains (has) binding activity relative to the activity of the Cas9 polypeptide without the inserted heterologous amino acid or heterologous polypeptide. For example, in some cases, the Cas9 fusion polypeptide has (retains) 50% or more of the binding activity of the corresponding Cas9 polypeptide (the Cas9 polypeptide that does not have the insertion). For example, in some cases, the Cas9 fusion polypeptide has (retains) 60% or more (70% or more, 80% or more, 90% or more, 92% or more, 95% or more, 98% or more, or 100%) of the binding activity of the corresponding Cas9 polypeptide (the Cas9 polypeptide that does not have the insertion).

[0262] In some cases, the Cas9 fusion polypeptide retains (has) cleavage activity relative to the activity of the Cas9 polypeptide without the inserted heterologous amino acid or heterologous polypeptide. For example, in some cases, the Cas9 fusion polypeptide has (retains) 50% or more of the cleavage activity of the corresponding Cas9 polypeptide (the Cas9 polypeptide that does not have the insertion). For example, in some cases, the Cas9 fusion polypeptide has (retains) 60% or more (70% or more, 80% or more, 90% or more, 92% or more, 95% or more, 98% or more, or 100%) of the cleavage activity of the corresponding Cas9 polypeptide (the Cas9 polypeptide that does not have the insertion).

[0263] In some cases, the Cas9 fusion polypeptide retains (has) binding and cleavage activity relative to the activity of the Cas9 polypeptide without the inserted heterologous amino acid or heterologous polypeptide. For example, in some cases, the Cas9 fusion polypeptide has (retains) 50% or more of the binding and cleavage activity of the corresponding Cas9 polypeptide (the Cas9 polypeptide that does not have the insertion). For example, in some cases, the Cas9 fusion polypeptide has (retains) 60% or more (70% or more, 80% or more, 90% or more, 92% or more, 95% or more, 98% or more, or 100%) of the binding and cleavage activity of the corresponding Cas9 polypeptide (the Cas9 polypeptide that does not have the insertion). Methods of measuring cleaving and/or binding activity of a Cas9 polypeptide and/or a Cas9 fusion polypeptide will be known to one of ordinary skill in the art and any convenient method can be used.

[0264] Table 4 lists suitable Cas9 polypeptide insertion sites into which a heterologous amino acid or heterologous polypeptide can be inserted to generate a fusion Cas9 polypeptide of the present disclosure.

TABLE 4
Identified insertion sites within the Cas9 protein. A heterologous
amino acid or heterologous polypeptide can be inserted immediately
adjacent and C-terminal to the position listed (see examples
section below), or immediately adjacent and N-terminal to the
position listed. Numbering is according to the Cas9 protein set
forth in SEQ ID NO: 5. Corresponding insertion sites in other
Cas9 polypeptides are readily identified by aligning the amino
acid sequence of any given Cas9 polypeptide with the amino acid
sequence of the Cas9 protein set forth in SEQ ID NO: 5.

| Domain/Region | |
|---|---|
| of insertion | Insertion Sites |
| RuvC domain | 3, 4, 42 |
| (RuvCI Region) | |
| RuvC domain | 719, 721,724 |
| (RuvCII Region) | |
| RuvC domain | 940, 941, 944, 947, 952, 1010, 1011, 1012, 1015, |
| (RuvCIII Region) | 1016, 1022, 1026, 1027, 1031, 1034, 1046, 1047, |
| | 1049, 1050, 1051, 1052, 1053, 1054, 1056, 1058, |
| | 1061, 1062, 1063, 1064, 1065, 1068, 1070, 1071, |
| | 1073 |
| alpha helical RNA | 112, 127, 193, 197, 202, 204, 205, 206, 207, 208, |
| recognition lobe | 209, 211, 214, 217, 228, 231, 238, 257, 259, 313, |
| | 390, 456, 460, 467, 468, 470, 474, 532, 533, 536, |
| | 576, 577, 579, 588, 639, 641, 645, 647, 687, 689, |
| | 690, 692, 713 |
| linker between the | 715, 717 |
| alpha helical and | |
| nuclease lobes | |
| PAM interacting | 1145, 1148, 1149, 1152, 1153, 1155, 1156, 1160, |
| domain | 1161, 1175, 1179, 1183, 1186, 1188, 1189, 1190, |
| | 1191, 1193, 1194, 1195, 1196, 1197, 1204, 1205, |
| | 1206, 1207, 1212, 1213, 1228, 1229, 1230, 1233, |
| | 1234, 1237, 1238, 1239, 1240, 1242, 1243, 1244, |
| | 1246, 1247, 1248, 1250, 1251, 1252, 1253, 1255, |
| | 1259, 1260, 1262, 1267, 1268, 1269, 1270, 1281, |
| | 1282, 1283, 1284, 1287, 1289, 1291, 1292, 1293, |
| | 1294, 1295, 1296, 1298, 1299, 1300, 1302, 1304, |
| | 1306, 1307, 1344, 1346, 1347, 1348, 1360, 1363, |
| | 1366, 1367 |

[0265] In some cases, a heterologous amino acid or heterologous polypeptide is inserted in a RuvC domain (e.g., immediately adjacent and C-terminal to an amino acid residue corresponding to a residue selected from 3, 4, 42, 719, 721, 724, 940, 941, 944, 947, 952, 1010, 1011, 1012, 1015, 1016, 1022, 1026, 1027, 1031, 1034, 1046, 1047, 1049, 1050, 1051, 1052, 1053, 1054, 1056, 1058, 1061, 1062, 1063, 1064, 1065, 1068, 1070, 1071, and 1073 of the Cas9 protein set forth in SEQ ID NO: 5). In some cases, a heterologous amino acid or heterologous polypeptide is inserted in a RuvC domain (e.g., immediately adjacent and N-terminal to an amino acid residue corresponding to a residue selected from 3, 4, 42, 719, 721, 724, 940, 941, 944, 947, 952, 1010, 1011, 1012, 1015, 1016, 1022, 1026, 1027, 1031, 1034, 1046, 1047, 1049, 1050, 1051, 1052, 1053, 1054, 1056, 1058, 1061, 1062, 1063, 1064, 1065, 1068, 1070, 1071, and 1073 of the Cas9 protein set forth in SEQ ID NO: 5).

[0266] In some cases, a heterologous amino acid or heterologous polypeptide is inserted in a RuvCI region (e.g., immediately adjacent and C-terminal to an amino acid residue corresponding to a residue selected from 3, 4, and 42 of the Cas9 protein set forth in SEQ ID NO: 5). In some cases, a heterologous amino acid or heterologous polypeptide is inserted in a RuvCI region (e.g., immediately adjacent and N-terminal to an amino acid residue corresponding to a residue selected from 3, 4, and 42 of the Cas9 protein set forth in SEQ ID NO: 5).

[0267] In some cases, a heterologous amino acid or heterologous polypeptide is inserted in a RuvCII region (e.g., immediately adjacent and C-terminal to an amino acid residue corresponding to a residue selected from 719, 721, and 724 of the Cas9 protein set forth in SEQ ID NO: 5). In some cases, a heterologous amino acid or heterologous polypeptide is inserted in a RuvCII region (e.g., immediately adjacent and N-terminal to an amino acid residue corresponding to a residue selected from 719, 721, and 724 of the Cas9 protein set forth in SEQ ID NO: 5).

[0268] In some cases, a heterologous amino acid or heterologous polypeptide is inserted in a Ruv CIII region (e.g., immediately adjacent and C-terminal to an amino acid residue corresponding to a residue selected from 940, 941, 944, 947, 952, 1010, 1011, 1012, 1015, 1016, 1022, 1026, 1027, 1031, 1034, 1046, 1047, 1049, 1050, 1051, 1052, 1053, 1054, 1056, 1058, 1061, 1062, 1063, 1064, 1065, 1068, 1070, 1071, and 1073 of the Cas9 protein set forth in SEQ ID NO: 5). In some cases, a heterologous amino acid or heterologous polypeptide is inserted in a Ruv CIII region (e.g., immediately adjacent and N-terminal to an amino acid residue corresponding to a residue selected from 940, 941, 944, 947, 952, 1010, 1011, 1012, 1015, 1016, 1022, 1026, 1027, 1031, 1034, 1046, 1047, 1049, 1050, 1051, 1052, 1053, 1054, 1056, 1058, 1061, 1062, 1063, 1064, 1065, 1068, 1070, 1071, and 1073 of the Cas9 protein set forth in SEQ ID NO: 5).

[0269] In some cases, a heterologous amino acid or heterologous polypeptide is inserted in an alpha helical RNA recognition lobe (sometimes referred to as REC in the art) at a position that is immediately adjacent and C-terminal to an amino acid residue corresponding to a residue selected from 112, 127, 193, 197, 202, 204, 205, 206, 207, 208, 209, 211, 214, 217, 228, 231, 238, 257, 259, 313, 390, 456, 460, 467, 468, 470, 474, 532, 533, 536, 576, 577, 579, 588, 639, 641, 645, 647, 687, 689, 690, 692, and 713, of the Cas9 protein set forth in SEQ ID NO: 5. In some cases, a heterologous amino acid or heterologous polypeptide is inserted in an alpha helical RNA recognition lobe (sometimes referred to as REC in the art) at a position that is immediately adjacent and N-terminal to an amino acid residue corresponding to a residue selected from 112, 127, 193, 197, 202, 204, 205, 206, 207, 208, 209, 211, 214, 217, 228, 231, 238, 257, 259, 313, 390, 456, 460, 467, 468, 470, 474, 532, 533, 536, 576, 577, 579, 588, 639, 641, 645, 647, 687, 689, 690, 692, and 713, of the Cas9 protein set forth in SEQ ID NO: 5.

[0270] In some cases, a heterologous amino acid or heterologous polypeptide is inserted in a linker that is between the alpha helical and nuclease lobes at a position that is immediately adjacent and C-terminal to an amino acid residue corresponding to a residue selected from 715 and 717, of the Cas9 protein set forth in SEQ ID NO: 5. In some cases, a heterologous amino acid or heterologous polypeptide is inserted in a linker that is between the alpha helical and nuclease lobes at a position that is immediately adjacent and N-terminal to an amino acid residue corresponding to a residue selected from 715 and 717, of the Cas9 protein set forth in SEQ ID NO: 5.

[0271] In some cases, a heterologous amino acid or heterologous polypeptide is inserted in an HNH domain at a position that is immediately adjacent and C-terminal to an amino acid residue corresponding to a residue selected from 798, 801, 802, 804, 834, 868, and 890, of the Cas9 protein set forth in SEQ ID NO: 5. In some cases, a heterologous amino acid or heterologous polypeptide is inserted in an HNH domain at a position that is immediately adjacent and N-terminal to an amino acid residue corresponding to a residue selected from 798, 801, 802, 804, 834, 868, and 890, of the Cas9 protein set forth in SEQ ID NO: 5.

[0272] In some cases, a heterologous amino acid or heterologous polypeptide is inserted in a PAM interacting domain at a position that is immediately adjacent and C-terminal to an amino acid residue corresponding to a residue selected from 1145, 1148, 1149, 1152, 1153, 1155, 1156, 1160, 1161, 1175, 1179, 1183, 1186, 1188, 1189, 1190, 1191, 1193, 1194, 1195, 1196, 1197, 1204, 1205, 1206, 1207, 1212, 1213, 1228, 1229, 1230, 1233, 1234, 1237, 1238, 1239, 1240, 1242, 1243, 1244, 1246, 1247, 1248, 1250, 1251, 1252, 1253, 1255, 1259, 1260, 1262, 1267, 1268, 1269, 1270, 1281, 1282, 1283, 1284, 1287, 1289, 1291, 1292, 1293, 1294, 1295, 1296, 1298, 1299, 1300, 1302, 1304, 1306, 1307, 1344, 1346, 1347, 1348, 1360, 1363, 1366, and 1367, of the Cas9 protein set forth in SEQ ID NO: 5. In some cases, a heterologous amino acid or heterologous polypeptide is inserted in a PAM interacting domain at a position that is immediately adjacent and N-terminal to an amino acid residue corresponding to a residue selected from 1145, 1148, 1149, 1152, 1153, 1155, 1156, 1160, 1161, 1175, 1179, 1183, 1186, 1188, 1189, 1190, 1191, 1193, 1194, 1195, 1196, 1197, 1204, 1205, 1206, 1207, 1212, 1213, 1228, 1229, 1230, 1233, 1234, 1237, 1238, 1239, 1240, 1242, 1243, 1244, 1246, 1247, 1248, 1250, 1251, 1252, 1253, 1255, 1259, 1260, 1262, 1267, 1268, 1269, 1270, 1281, 1282, 1283, 1284, 1287, 1289, 1291, 1292, 1293, 1294, 1295, 1296, 1298, 1299, 1300, 1302, 1304, 1306, 1307, 1344, 1346, 1347, 1348, 1360, 1363, 1366, and 1367, of the Cas9 protein set forth in SEQ ID NO: 5.

[0273] In some cases, a heterologous amino acid or heterologous polypeptide is inserted inside within a region of secondary structure (e.g., at a position that is immediately adjacent and C-terminal to an amino acid residue corresponding to a residue selected from: 42, 127, 193, 195, 208, 209, 211, 214, 238, 390, 639, 641, 645, 647, 721, 722, 724, 802, 804, 1034, 1063, 1064, 1065, 1148, 1149, 1150, 1175, 1179, 1183, 1197, 1204, 1212, 1213, 1255, 1259, 1260, 1262, 1267, 1268, 1269, 1270, 1286, 1287, 1289, 1291, 1292, 1293, 1294, 1295, 1296, 1306, 1307, 1347, and 1348, of the Cas9 protein set forth in SEQ ID NO: 5). For example, in some cases, a heterologous amino acid or heterologous polypeptide is inserted within a region of secondary structure (e.g., at a position that is immediately adjacent and C-terminal to an amino acid residue corresponding to a residue selected from: 1291, 1260, 1196, 1267, 1064, 1161, and 1148, of the Cas9 protein set forth in SEQ ID NO: 5). In some cases, a heterologous amino acid or heterologous polypeptide is inserted inside within a region of secondary structure (e.g., at a position that is immediately adjacent and N-terminal to an amino acid residue corresponding to a residue selected from: 42, 127, 193, 195, 208, 209, 211, 214, 238, 390, 639, 641, 645, 647, 721, 722, 724, 802, 804, 1034, 1063, 1064, 1065, 1148, 1149, 1150, 1175, 1179, 1183, 1197, 1204, 1212, 1213, 1255, 1259, 1260, 1262, 1267, 1268, 1269, 1270, 1286, 1287, 1289, 1291, 1292, 1293, 1294, 1295, 1296, 1306, 1307, 1347, and 1348, of the Cas9 protein set forth in SEQ ID NO: 5). For example, in some cases, a heterologous amino acid or heterologous polypeptide is inserted within a region of secondary structure (e.g., at a position that is immediately adjacent and N-terminal to an amino acid residue corresponding to a residue selected from: 1291, 1260, 1196, 1267, 1064, 1161, and 1148, of the Cas9 protein set forth in SEQ ID NO: 5).

[0274] In some cases, a heterologous amino acid or heterologous polypeptide is inserted immediately adjacent and C-terminal to an amino acid residue corresponding to residue 231 of the Cas9 protein set forth in SEQ ID NO: 5. For example, in some such cases, an inserted heterologous polypeptide confers an inducible conformational change on the Cas9 fusion polypeptide (e.g., the heterologous polypeptide can be an estrogen receptor alpha ligand binding domain (ER-LBD)). In some cases, an inserted heterologous polypeptide (inserted immediately adjacent and C-terminal to an amino acid residue corresponding to residue 231 of the Cas9 protein set forth in SEQ ID NO: 5) confers an inducible conformational change on the Cas9 fusion polypeptide and the heterologous polypeptide is a light-inducible LOV2 domain. In some cases, a heterologous amino acid or heterologous polypeptide is inserted immediately adjacent and N-terminal to an amino acid residue corresponding to residue 231 of the Cas9 protein set forth in SEQ ID NO: 5. For example, in some such cases, an inserted heterologous polypeptide confers an inducible conformational change on the Cas9 fusion polypeptide (e.g., the heterologous polypeptide can be an estrogen receptor alpha ligand binding domain (ER-LBD)). In some cases, an inserted heterologous polypeptide (inserted immediately adjacent and C-terminal to an amino acid residue corresponding to residue 231 of the Cas9 protein set forth in SEQ ID NO: 5) confers an inducible conformational change on the Cas9 fusion polypeptide and the heterologous polypeptide is a light-inducible LOV2 domain.

[0275] In some cases, a Cas9 polypeptide of the present disclosure comprises: a) a Cas9 polypeptide; and b) a heterologous amino acid or heterologous polypeptide inserted internally within the Cas9 polypeptide, where the heterologous amino acid or heterologous polypeptide is inserted at a position that is immediately adjacent and C-terminal to an amino acid residue corresponding to amino acid 3 of the Cas9 protein set forth in SEQ ID NO: 5, where the Cas9 fusion polypeptide retains cleavage and/or binding activity relative to the activity of the Cas9 polypeptide without the inserted heterologous amino acid or heterologous polypeptide. In some cases, a Cas9 polypeptide of the present disclosure comprises: a) a Cas9 polypeptide; and b) a heterologous amino acid or heterologous polypeptide inserted internally within the Cas9 polypeptide, where the heterologous amino acid or heterologous polypeptide is inserted at a position that is immediately adjacent and N-terminal to an amino acid residue corresponding to amino acid 3 of the Cas9 protein set forth in SEQ ID NO: 5, where the Cas9 fusion polypeptide retains cleavage and/or binding activity relative to the activity of the Cas9 polypeptide without the inserted heterologous amino acid or heterologous polypeptide.

[0276] In some cases, a Cas9 polypeptide of the present disclosure comprises: a) a Cas9 polypeptide; and b) a heterologous amino acid or heterologous polypeptide inserted internally within the Cas9 polypeptide, where the heterologous amino acid or heterologous polypeptide is inserted at a position that is immediately adjacent and C-terminal to an amino acid residue corresponding to amino acid 4 of the Cas9 protein set forth in SEQ ID NO: 5, where the Cas9 fusion polypeptide retains cleavage and/or binding activity relative to the activity of the Cas9 polypeptide without the inserted heterologous amino acid or heterologous polypeptide. In some cases, a Cas9 polypeptide of the present disclosure comprises: a) a Cas9 polypeptide; and b) a heterologous amino acid or heterologous polypeptide inserted internally within the Cas9 polypeptide, where the heterologous amino acid or heterologous polypeptide is inserted at a position that is immediately adjacent and N-terminal to an amino acid residue corresponding to amino acid 4 of the Cas9 protein set forth in SEQ ID NO: 5, where the Cas9 fusion polypeptide retains cleavage and/or binding activity relative to the activity of the Cas9 polypeptide without the inserted heterologous amino acid or heterologous polypeptide.

[0277] In some cases, a Cas9 polypeptide of the present disclosure comprises: a) a Cas9 polypeptide; and b) a heterologous amino acid or heterologous polypeptide inserted internally within the Cas9 polypeptide, where the heterologous amino acid or heterologous polypeptide is inserted at a position that is immediately adjacent and C-terminal to an amino acid residue corresponding to amino acid 42 of the Cas9 protein set forth in SEQ ID NO: 5, where the Cas9 fusion polypeptide retains cleavage and/or binding activity relative to the activity of the Cas9 polypeptide without the inserted heterologous amino acid or heterologous polypeptide. In some cases, a Cas9 polypeptide of the present disclosure comprises: a) a Cas9 polypeptide; and b) a heterologous amino acid or heterologous polypeptide inserted internally within the Cas9 polypeptide, where the heterologous amino acid or heterologous polypeptide is inserted at a position that is immediately adjacent and N-terminal to an amino acid residue corresponding to amino acid 42 of the Cas9 protein set forth in SEQ ID NO: 5, where the Cas9 fusion polypeptide retains cleavage and/or binding activity relative to the activity of the Cas9 polypeptide without the inserted heterologous amino acid or heterologous polypeptide.

[0278] In some cases, a Cas9 polypeptide of the present disclosure comprises: a) a Cas9 polypeptide; and b) a heterologous amino acid or heterologous polypeptide inserted internally within the Cas9 polypeptide, where the heterologous amino acid or heterologous polypeptide is inserted at a position that is immediately adjacent and C-terminal to an amino acid residue corresponding to amino acid 112 of the Cas9 protein set forth in SEQ ID NO: 5, where the Cas9 fusion polypeptide retains cleavage and/or binding activity relative to the activity of the Cas9 polypeptide without the inserted heterologous amino acid or heterologous polypeptide. In some cases, a Cas9 polypeptide of the present disclosure comprises: a) a Cas9 polypeptide; and b) a heterologous amino acid or heterologous polypeptide inserted internally within the Cas9 polypeptide, where the heterologous amino acid or heterologous polypeptide is inserted at a position that is immediately adjacent and N-terminal to an amino acid residue corresponding to amino acid 112 of the Cas9 protein set forth in SEQ ID NO: 5, where the Cas9 fusion polypeptide retains cleavage and/or binding activity relative to the activity of the Cas9 polypeptide without the inserted heterologous amino acid or heterologous polypeptide.

[0279] In some cases, a Cas9 polypeptide of the present disclosure comprises: a) a Cas9 polypeptide; and b) a heterologous amino acid or heterologous polypeptide inserted internally within the Cas9 polypeptide, where the heterologous amino acid or heterologous polypeptide is inserted at a position that is immediately adjacent and C-terminal to an amino acid residue corresponding to amino acid 127 of the Cas9 protein set forth in SEQ ID NO: 5, where the Cas9 fusion polypeptide retains cleavage and/or binding activity relative to the activity of the Cas9 polypeptide without the inserted heterologous amino acid or heterologous polypeptide. In some cases, a Cas9 polypeptide of the present disclosure comprises: a) a Cas9 polypeptide; and b) a heterologous amino acid or heterologous polypeptide inserted internally within the Cas9 polypeptide, where the heterologous amino acid or heterologous polypeptide is inserted at a position that is immediately adjacent and N-terminal to an amino acid residue corresponding to amino acid 127 of the Cas9 protein set forth in SEQ ID NO: 5, where the Cas9 fusion polypeptide retains cleavage and/or binding activity relative to the activity of the Cas9 polypeptide without the inserted heterologous amino acid or heterologous polypeptide.

[0280] In some cases, a Cas9 polypeptide of the present disclosure comprises: a) a Cas9 polypeptide; and b) a heterologous amino acid or heterologous polypeptide inserted internally within the Cas9 polypeptide, where the heterologous amino acid or heterologous polypeptide is inserted at a position that is immediately adjacent and C-terminal to an amino acid residue corresponding to amino acid 193 of the Cas9 protein set forth in SEQ ID NO: 5, where the Cas9 fusion polypeptide retains cleavage and/or binding activity relative to the activity of the Cas9 polypeptide without the inserted heterologous amino acid or heterologous polypeptide. In some cases, a Cas9 polypeptide of the present disclosure comprises: a) a Cas9 polypeptide; and b) a heterologous amino acid or heterologous polypeptide inserted internally within the Cas9 polypeptide, where the heterologous amino acid or heterologous polypeptide is inserted at a position that is immediately adjacent and N-terminal to an amino acid residue corresponding to amino acid 193 of the Cas9 protein set forth in SEQ ID NO: 5, where the Cas9 fusion polypeptide retains cleavage and/or binding activity relative to the activity of the Cas9 polypeptide without the inserted heterologous amino acid or heterologous polypeptide.

[0281] In some cases, a Cas9 polypeptide of the present disclosure comprises: a) a Cas9 polypeptide; and b) a heterologous amino acid or heterologous polypeptide inserted internally within the Cas9 polypeptide, where the heterologous amino acid or heterologous polypeptide is inserted at a position that is immediately adjacent and C-terminal to an amino acid residue corresponding to amino acid 197 of the Cas9 protein set forth in SEQ ID NO: 5, where the Cas9 fusion polypeptide retains cleavage and/or binding activity relative to the activity of the Cas9 polypeptide without the inserted heterologous amino acid or heterologous polypeptide. In some cases, a Cas9 polypeptide of the present disclosure comprises: a) a Cas9 polypeptide; and b) a heterologous amino acid or heterologous polypeptide inserted internally within the Cas9 polypeptide, where the heterologous amino acid or heterologous polypeptide is inserted at a position that is immediately adjacent and N-terminal to an amino acid residue corresponding to amino acid 197 of the Cas9 protein set forth in SEQ ID NO: 5, where the Cas9 fusion polypeptide retains cleavage and/or binding activity relative to the activity of the Cas9 polypeptide without the inserted heterologous amino acid or heterologous polypeptide.

[0282] In some cases, a Cas9 polypeptide of the present disclosure comprises: a) a Cas9 polypeptide; and b) a heterologous amino acid or heterologous polypeptide inserted internally within the Cas9 polypeptide, where the heterologous amino acid or heterologous polypeptide is inserted at a position that is immediately adjacent and C-terminal to an amino acid residue corresponding to amino acid 202 of the Cas9 protein set forth in SEQ ID NO: 5, where the Cas9 fusion polypeptide retains cleavage and/or binding activity relative to the activity of the Cas9 polypeptide without the inserted heterologous amino acid or heterologous polypeptide. In some cases, a Cas9 polypeptide of the present disclosure comprises: a) a Cas9 polypeptide; and b) a heterologous amino acid or heterologous polypeptide inserted internally within the Cas9 polypeptide, where the heterologous amino acid or heterologous polypeptide is inserted at a position that is immediately adjacent and N-terminal to an amino acid residue corresponding to amino acid 202 of the Cas9 protein set forth in SEQ ID NO: 5, where the Cas9 fusion polypeptide retains cleavage and/or binding activity relative to the activity of the Cas9 polypeptide without the inserted heterologous amino acid or heterologous polypeptide.

[0283] In some cases, a Cas9 polypeptide of the present disclosure comprises: a) a Cas9 polypeptide; and b) a heterologous amino acid or heterologous polypeptide inserted internally within the Cas9 polypeptide, where the heterologous amino acid or heterologous polypeptide is inserted at a position that is immediately adjacent and C-terminal to an amino acid residue corresponding to amino acid 204 of the Cas9 protein set forth in SEQ ID NO: 5, where the Cas9 fusion polypeptide retains cleavage and/or binding activity relative to the activity of the Cas9 polypeptide without the inserted heterologous amino acid or heterologous polypeptide. In some cases, a Cas9 polypeptide of the present disclosure comprises: a) a Cas9 polypeptide; and b) a heterologous amino acid or heterologous polypeptide inserted internally within the Cas9 polypeptide, where the heterologous amino acid or heterologous polypeptide is inserted at a position that is immediately adjacent and N-terminal to an amino acid residue corresponding to amino acid 204 of the Cas9 protein set forth in SEQ ID NO: 5, where the Cas9 fusion polypeptide retains cleavage and/or binding activity relative to the activity of the Cas9 polypeptide without the inserted heterologous amino acid or heterologous polypeptide.

[0284] In some cases, a Cas9 polypeptide of the present disclosure comprises: a) a Cas9 polypeptide; and b) a heterologous amino acid or heterologous polypeptide inserted internally within the Cas9 polypeptide, where the heterologous amino acid or heterologous polypeptide is inserted at a position that is immediately adjacent and C-terminal to an amino acid residue corresponding to amino acid 205 of the Cas9 protein set forth in SEQ ID NO: 5, where the Cas9 fusion polypeptide retains cleavage and/or binding activity relative to the activity of the Cas9 polypeptide without the inserted heterologous amino acid or heterologous polypeptide.

[0285] In some cases, a Cas9 polypeptide of the present disclosure comprises: a) a Cas9 polypeptide; and b) a heterologous amino acid or heterologous polypeptide inserted internally within the Cas9 polypeptide, where the heterologous amino acid or heterologous polypeptide is inserted at a position that is immediately adjacent and C-terminal to an amino acid residue corresponding to amino acid 206 of the Cas9 protein set forth in SEQ ID NO: 5, where the Cas9 fusion polypeptide retains cleavage and/or binding activity relative to the activity of the Cas9 polypeptide without the inserted heterologous amino acid or heterologous polypeptide. In some cases, a Cas9 polypeptide of the present disclosure comprises: a) a Cas9 polypeptide; and b) a heterologous amino acid or heterologous polypeptide inserted internally within the Cas9 polypeptide, where the heterologous amino acid or heterologous polypeptide is inserted at a position that is immediately adjacent and N-terminal to an amino acid residue corresponding to amino acid 206 of the Cas9 protein set forth in SEQ ID NO: 5, where the Cas9 fusion polypeptide retains cleavage and/or binding activity relative to the activity of the Cas9 polypeptide without the inserted heterologous amino acid or heterologous polypeptide.

[0286] In some cases, a Cas9 polypeptide of the present disclosure comprises: a) a Cas9 polypeptide; and b) a heterologous amino acid or heterologous polypeptide inserted internally within the Cas9 polypeptide, where the heterologous amino acid or heterologous polypeptide is inserted at a position that is immediately adjacent and C-terminal to an amino acid residue corresponding to amino acid 207 of the Cas9 protein set forth in SEQ ID NO: 5, where the Cas9 fusion polypeptide retains cleavage and/or binding activity relative to the activity of the Cas9 polypeptide without the inserted heterologous amino acid or heterologous polypeptide.

[0287] In some cases, a Cas9 polypeptide of the present disclosure comprises: a) a Cas9 polypeptide; and b) a heterologous amino acid or heterologous polypeptide inserted internally within the Cas9 polypeptide, where the heterologous amino acid or heterologous polypeptide is inserted at a position that is immediately adjacent and C-terminal to an amino acid residue corresponding to amino acid 208 of the Cas9 protein set forth in SEQ ID NO: 5, where the Cas9 fusion polypeptide retains cleavage and/or binding activity relative to the activity of the Cas9 polypeptide without the inserted heterologous amino acid or heterologous polypeptide. In some cases, a Cas9 polypeptide of the present disclosure comprises: a) a Cas9 polypeptide; and b) a heterologous amino acid or heterologous polypeptide inserted internally within the Cas9 polypeptide, where the heterologous amino acid or heterologous polypeptide is inserted at a position that is immediately adjacent and N-terminal to an amino acid residue corresponding to amino acid 208 of the Cas9 protein set forth in SEQ ID NO: 5, where the Cas9 fusion polypeptide retains cleavage and/or binding activity relative to the activity of the Cas9 polypeptide without the inserted heterologous amino acid or heterologous polypeptide.

[0288] In some cases, a Cas9 polypeptide of the present disclosure comprises: a) a Cas9 polypeptide; and b) a heterologous amino acid or heterologous polypeptide inserted internally within the Cas9 polypeptide, where the heterologous amino acid or heterologous polypeptide is inserted at a position that is immediately adjacent and C-terminal to an amino acid residue corresponding to amino acid 209 of the Cas9 protein set forth in SEQ ID NO: 5, where the Cas9 fusion polypeptide retains cleavage and/or binding activity relative to the activity of the Cas9 polypeptide without the inserted heterologous amino acid or heterologous polypeptide. In some cases, a Cas9 polypeptide of the present disclosure comprises: a) a Cas9 polypeptide; and b) a heterologous amino acid or heterologous polypeptide inserted internally within the Cas9 polypeptide, where the heterologous amino acid or heterologous polypeptide is inserted at a position that is immediately adjacent and N-terminal to an amino acid residue corresponding to amino acid 209 of the Cas9 protein set forth in SEQ ID NO: 5, where the Cas9 fusion polypeptide retains cleavage and/or binding activity relative to the activity of the Cas9 polypeptide without the inserted heterologous amino acid or heterologous polypeptide.

[0289] In some cases, a Cas9 polypeptide of the present disclosure comprises: a) a Cas9 polypeptide; and b) a heterologous amino acid or heterologous polypeptide inserted internally within the Cas9 polypeptide, where the heterologous amino acid or heterologous polypeptide is inserted at a position that is immediately adjacent and C-terminal to an amino acid residue corresponding to amino acid 211 of the Cas9 protein set forth in SEQ ID NO: 5, where the Cas9 fusion polypeptide retains cleavage and/or binding activity relative to the activity of the Cas9 polypeptide without the inserted heterologous amino acid or heterologous polypeptide.

[0290] In some cases, a Cas9 polypeptide of the present disclosure comprises: a) a Cas9 polypeptide; and b) a heterologous amino acid or heterologous polypeptide inserted internally within the Cas9 polypeptide, where the heterologous amino acid or heterologous polypeptide is inserted at a position that is immediately adjacent and C-terminal to an amino acid residue corresponding to amino acid 214 of the Cas9 protein set forth in SEQ ID NO: 5, where the Cas9 fusion polypeptide retains cleavage and/or binding activity relative to the activity of the Cas9 polypeptide without the inserted heterologous amino acid or heterologous polypeptide. In some cases, a Cas9 polypeptide of the present disclosure comprises: a) a Cas9 polypeptide; and b) a heterologous amino acid or heterologous polypeptide inserted internally within the Cas9 polypeptide, where the heterologous amino acid or heterologous polypeptide is inserted at a position that is immediately adjacent and N-terminal to an amino acid residue corresponding to amino acid 214 of the Cas9 protein set forth in SEQ ID NO: 5, where the Cas9 fusion polypeptide retains cleavage and/or binding activity relative to the activity of the Cas9 polypeptide without the inserted heterologous amino acid or heterologous polypeptide.

[0291] In some cases, a Cas9 polypeptide of the present disclosure comprises: a) a Cas9 polypeptide; and b) a heterologous amino acid or heterologous polypeptide inserted internally within the Cas9 polypeptide, where the heterologous amino acid or heterologous polypeptide is inserted at a position that is immediately adjacent and C-terminal to an amino acid residue corresponding to amino acid 217 of the Cas9 protein set forth in SEQ ID NO: 5, where the Cas9 fusion polypeptide retains cleavage and/or binding activity relative to the activity of the Cas9 polypeptide without the inserted heterologous amino acid or heterologous polypeptide. In some cases, a Cas9 polypeptide of the present disclosure comprises: a) a Cas9 polypeptide; and b) a heterologous amino acid or heterologous polypeptide inserted internally within the Cas9 polypeptide, where the heterologous amino acid or heterologous polypeptide is inserted at a position that is immediately adjacent and N-terminal to an amino acid residue corresponding to amino acid 217 of the Cas9 protein set forth in SEQ ID NO: 5, where the Cas9 fusion polypeptide retains cleavage and/or binding activity relative to the activity of the Cas9 polypeptide without the inserted heterologous amino acid or heterologous polypeptide.

[0292] In some cases, a Cas9 polypeptide of the present disclosure comprises: a) a Cas9 polypeptide; and b) a heterologous amino acid or heterologous polypeptide inserted internally within the Cas9 polypeptide, where the heterologous amino acid or heterologous polypeptide is inserted at a position that is immediately adjacent and C-terminal to an amino acid residue corresponding to amino acid 228 of the Cas9 protein set forth in SEQ ID NO: 5, where the Cas9 fusion polypeptide retains cleavage and/or binding activity relative to the activity of the Cas9 polypeptide without the inserted heterologous amino acid or heterologous polypeptide.

[0293] In some cases, a Cas9 polypeptide of the present disclosure comprises: a) a Cas9 polypeptide; and b) a heterologous amino acid or heterologous polypeptide inserted internally within the Cas9 polypeptide, where the heterologous amino acid or heterologous polypeptide is inserted at a position that is immediately adjacent and C-terminal to an amino acid residue corresponding to amino acid 231 of the Cas9 protein set forth in SEQ ID NO: 5, where the Cas9 fusion polypeptide retains cleavage and/or binding activity relative to the activity of the Cas9 polypeptide without the inserted heterologous amino acid or heterologous polypeptide. In some cases, a Cas9 polypeptide of the present disclosure comprises: a) a Cas9 polypeptide; and b) a heterologous amino acid or heterologous polypeptide inserted internally within the Cas9 polypeptide, where the heterologous amino acid or heterologous polypeptide is inserted at a position that is immediately adjacent and N-terminal to an amino acid residue corresponding to amino acid 231 of the Cas9 protein set forth in SEQ ID NO: 5, where the Cas9 fusion polypeptide retains cleavage and/or binding activity relative to the activity of the Cas9 polypeptide without the inserted heterologous amino acid or heterologous polypeptide.

[0294] In some cases, a Cas9 polypeptide of the present disclosure comprises: a) a Cas9 polypeptide; and b) a heterologous amino acid or heterologous polypeptide inserted internally within the Cas9 polypeptide, where the heterologous amino acid or heterologous polypeptide is inserted at a position that is immediately adjacent and C-terminal to an amino acid residue corresponding to amino acid 238 of the Cas9 protein set forth in SEQ ID NO: 5, where the Cas9 fusion polypeptide retains cleavage and/or binding activity relative to the activity of the Cas9 polypeptide without the inserted heterologous amino acid or heterologous polypeptide. In some cases, a Cas9 polypeptide of the present disclosure comprises: a) a Cas9 polypeptide; and b) a heterologous amino acid or heterologous polypeptide inserted internally within the Cas9 polypeptide, where the heterologous amino acid or heterologous polypeptide is inserted at a position that is immediately adjacent and N-terminal to an amino acid residue corresponding to amino acid 238 of the Cas9 protein set forth in SEQ ID NO: 5, where the Cas9 fusion polypeptide retains cleavage and/or binding activity relative to the activity of the Cas9 polypeptide without the inserted heterologous amino acid or heterologous polypeptide.

[0295] In some cases, a Cas9 polypeptide of the present disclosure comprises: a) a Cas9 polypeptide; and b) a heterologous amino acid or heterologous polypeptide inserted internally within the Cas9 polypeptide, where the heterologous amino acid or heterologous polypeptide is inserted at a position that is immediately adjacent and C-terminal to an amino acid residue corresponding to amino acid 257 of the Cas9 protein set forth in SEQ ID NO: 5, where the Cas9 fusion polypeptide retains cleavage and/or binding activity relative to the activity of the Cas9 polypeptide without the inserted heterologous amino acid or heterologous polypeptide.

[0296] In some cases, a Cas9 polypeptide of the present disclosure comprises: a) a Cas9 polypeptide; and b) a heterologous amino acid or heterologous polypeptide inserted internally within the Cas9 polypeptide, where the heterologous amino acid or heterologous polypeptide is inserted at a position that is immediately adjacent and C-terminal to an amino acid residue corresponding to amino acid 259 of the Cas9 protein set forth in SEQ ID NO: 5, where the Cas9 fusion polypeptide retains cleavage and/or binding activity relative to the activity of the Cas9 polypeptide without the inserted heterologous amino acid or heterologous polypeptide. In some cases, a Cas9 polypeptide of the present disclosure comprises: a) a Cas9 polypeptide; and b) a heterologous amino acid or heterologous polypeptide inserted internally within the Cas9 polypeptide, where the heterologous amino acid or heterologous polypeptide is inserted at a position that is immediately adjacent and N-terminal to an amino acid residue corresponding to amino acid 259 of the Cas9 protein set forth in SEQ ID NO: 5, where the Cas9 fusion polypeptide retains cleavage and/or binding activity relative to the activity of the Cas9 polypeptide without the inserted heterologous amino acid or heterologous polypeptide.

[0297] In some cases, a Cas9 polypeptide of the present disclosure comprises: a) a Cas9 polypeptide; and b) a heterologous amino acid or heterologous polypeptide inserted internally within the Cas9 polypeptide, where the heterologous amino acid or heterologous polypeptide is inserted at a position that is immediately adjacent and C-terminal to an amino acid residue corresponding to amino acid 313 of the Cas9 protein set forth in SEQ ID NO: 5, where the Cas9 fusion polypeptide retains cleavage and/or binding activity relative to the activity of the Cas9 polypeptide without the inserted heterologous amino acid or heterologous polypeptide. In some cases, a Cas9 polypeptide of the present disclosure comprises: a) a Cas9 polypeptide; and b) a heterologous amino acid or heterologous polypeptide inserted internally within the Cas9 polypeptide, where the heterologous amino acid or heterologous polypeptide is inserted at a position that is immediately adjacent and N-terminal to an amino acid residue corresponding to amino acid 313 of the Cas9 protein set forth in SEQ ID NO: 5, where the Cas9 fusion polypeptide retains cleavage and/or binding activity relative to the activity of the Cas9 polypeptide without the inserted heterologous amino acid or heterologous polypeptide.

[0298] In some cases, a Cas9 polypeptide of the present disclosure comprises: a) a Cas9 polypeptide; and b) a heterologous amino acid or heterologous polypeptide inserted internally within the Cas9 polypeptide, where the heterologous amino acid or heterologous polypeptide is inserted at a position that is immediately adjacent and C-terminal to an amino acid residue corresponding to amino acid 390 of the Cas9 protein set forth in SEQ ID NO: 5, where the Cas9 fusion polypeptide retains cleavage and/or binding activity relative to the activity of the Cas9 polypeptide without the inserted heterologous amino acid or heterologous polypeptide. In some cases, a Cas9 polypeptide of the present disclosure comprises: a) a Cas9 polypeptide; and b) a heterologous amino acid or heterologous polypeptide inserted internally within the Cas9 polypeptide, where the heterologous amino acid or heterologous polypeptide is inserted at a position that is immediately adjacent and N-terminal to an amino acid residue corresponding to amino acid 390 of the Cas9 protein set forth in SEQ ID NO: 5, where the Cas9 fusion polypeptide retains cleavage and/or binding activity relative to the activity of the Cas9 polypeptide without the inserted heterologous amino acid or heterologous polypeptide.

[0299] In some cases, a Cas9 polypeptide of the present disclosure comprises: a) a Cas9 polypeptide; and b) a heterologous amino acid or heterologous polypeptide inserted internally within the Cas9 polypeptide, where the heterologous amino acid or heterologous polypeptide is inserted at a position that is immediately adjacent and C-terminal to an amino acid residue corresponding to amino acid 456 of the Cas9 protein set forth in SEQ ID NO: 5, where the Cas9 fusion polypeptide retains cleavage and/or binding activity relative to the activity of the Cas9 polypeptide without the inserted heterologous amino acid or heterologous polypeptide. In some cases, a Cas9 polypeptide of the present disclosure comprises: a) a Cas9 polypeptide; and b) a heterologous amino acid or heterologous polypeptide inserted internally within the Cas9 polypeptide, where the heterologous amino acid or heterologous polypeptide is inserted at a position that is immediately adjacent and N-terminal to an amino acid residue corresponding to amino acid 456 of the Cas9 protein set forth in SEQ ID NO: 5, where the Cas9 fusion polypeptide retains cleavage and/or binding activity relative to the activity of the Cas9 polypeptide without the inserted heterologous amino acid or heterologous polypeptide.

[0300] In some cases, a Cas9 polypeptide of the present disclosure comprises: a) a Cas9 polypeptide; and b) a heterologous amino acid or heterologous polypeptide inserted internally within the Cas9 polypeptide, where the heterologous amino acid or heterologous polypeptide is inserted at a position that is immediately adjacent and C-terminal to an amino acid residue corresponding to amino acid 460 of the Cas9 protein set forth in SEQ ID NO: 5, where the Cas9 fusion polypeptide retains cleavage and/or binding activity relative to the activity of the Cas9 polypeptide without the inserted heterologous amino acid or heterologous polypeptide. In some cases, a Cas9 polypeptide of the present disclosure comprises: a) a Cas9 polypeptide; and b) a heterologous amino acid or heterologous polypeptide inserted internally within the Cas9 polypeptide, where the heterologous amino acid or heterologous polypeptide is inserted at a position that is immediately adjacent and N-terminal to an amino acid residue corresponding to amino acid 460 of the Cas9 protein set forth in SEQ ID NO: 5, where the Cas9 fusion polypeptide retains cleavage and/or binding activity relative to the activity of the Cas9 polypeptide without the inserted heterologous amino acid or heterologous polypeptide.

[0301] In some cases, a Cas9 polypeptide of the present disclosure comprises: a) a Cas9 polypeptide; and b) a heterologous amino acid or heterologous polypeptide inserted internally within the Cas9 polypeptide, where the heterologous amino acid or heterologous polypeptide is inserted at a position that is immediately adjacent and C-terminal to an amino acid residue corresponding to amino acid 467 of the Cas9 protein set forth in SEQ ID NO: 5, where the Cas9 fusion polypeptide retains cleavage and/or binding activity relative to the activity of the Cas9 polypeptide without the inserted heterologous amino acid or heterologous polypeptide. In some cases, a Cas9 polypeptide of the present disclosure comprises: a) a Cas9 polypeptide; and b) a heterologous amino acid or heterologous polypeptide inserted internally within the Cas9 polypeptide, where the heterologous amino acid or heterologous polypeptide is inserted at a position that is immediately adjacent and N-terminal to an amino acid residue corresponding to amino acid 467 of the Cas9 protein set forth in SEQ ID NO: 5, where the Cas9 fusion polypeptide retains cleavage and/or binding activity relative to the activity of the Cas9 polypeptide without the inserted heterologous amino acid or heterologous polypeptide.

[0302] In some cases, a Cas9 polypeptide of the present disclosure comprises: a) a Cas9 polypeptide; and b) a heterologous amino acid or heterologous polypeptide inserted internally within the Cas9 polypeptide, where the heterologous amino acid or heterologous polypeptide is inserted at a position that is immediately adjacent and C-terminal to an amino acid residue corresponding to amino acid 468 of the Cas9 protein set forth in SEQ ID NO: 5, where the Cas9 fusion polypeptide retains cleavage and/or binding activity relative to the activity of the Cas9 polypeptide without the inserted heterologous amino acid or heterologous polypeptide. In some cases, a Cas9 polypeptide of the present disclosure comprises: a) a Cas9 polypeptide; and b) a heterologous amino acid or heterologous polypeptide inserted internally within the Cas9 polypeptide, where the heterologous amino acid or heterologous polypeptide is inserted at a position that is immediately adjacent and N-terminal to an amino acid residue corresponding to amino acid 468 of the Cas9 protein set forth in SEQ ID NO: 5, where the Cas9 fusion polypeptide retains cleavage and/or binding activity relative to the activity of the Cas9 polypeptide without the inserted heterologous amino acid or heterologous polypeptide.

[0303] In some cases, a Cas9 polypeptide of the present disclosure comprises: a) a Cas9 polypeptide; and b) a heterologous amino acid or heterologous polypeptide inserted internally within the Cas9 polypeptide, where the heterologous amino acid or heterologous polypeptide is inserted at a position that is immediately adjacent and C-terminal to an amino acid residue corresponding to amino acid 470 of the Cas9 protein set forth in SEQ ID NO: 5, where the Cas9 fusion polypeptide retains cleavage and/or binding activity relative to the activity of the Cas9 polypeptide without the inserted heterologous amino acid or heterologous polypeptide. In some cases, a Cas9 polypeptide of the present disclosure comprises: a) a Cas9 polypeptide; and b) a heterologous amino acid or heterologous polypeptide inserted internally within the Cas9 polypeptide, where the heterologous amino acid or heterologous polypeptide is inserted at a position that is immediately adjacent and N-terminal to an amino acid residue corresponding to amino acid 470 of the Cas9 protein set forth in SEQ ID NO: 5, where the Cas9 fusion polypeptide retains cleavage and/or binding activity relative to the activity of the Cas9 polypeptide without the inserted heterologous amino acid or heterologous polypeptide.

[0304] In some cases, a Cas9 polypeptide of the present disclosure comprises: a) a Cas9 polypeptide; and b) a heterologous amino acid or heterologous polypeptide inserted internally within the Cas9 polypeptide, where the heterologous amino acid or heterologous polypeptide is inserted at a position that is immediately adjacent and C-terminal to an amino acid residue corresponding to amino acid 474 of the Cas9 protein set forth in SEQ ID NO: 5, where the Cas9 fusion polypeptide retains cleavage and/or binding activity relative to the activity of the Cas9 polypeptide without the inserted heterologous amino acid or heterologous polypeptide. In some cases, a Cas9 polypeptide of the present disclosure comprises: a) a Cas9 polypeptide; and b) a heterologous amino acid or heterologous polypeptide inserted internally within the Cas9 polypeptide, where the heterologous amino acid or heterologous polypeptide is inserted at a position that is immediately adjacent and N-terminal to an amino acid residue corresponding to amino acid 474 of the Cas9 protein set forth in SEQ ID NO: 5, where the Cas9 fusion polypeptide retains cleavage and/or binding activity relative to the activity of the Cas9 polypeptide without the inserted heterologous amino acid or heterologous polypeptide.

[0305] In some cases, a Cas9 polypeptide of the present disclosure comprises: a) a Cas9 polypeptide; and b) a heterologous amino acid or heterologous polypeptide inserted internally within the Cas9 polypeptide, where the heterologous amino acid or heterologous polypeptide is inserted at a position that is immediately adjacent and C-terminal to an amino acid residue corresponding to amino acid 532 of the Cas9 protein set forth in SEQ ID NO: 5, where the Cas9 fusion polypeptide retains cleavage and/or binding activity relative to the activity of the Cas9 polypeptide without the inserted heterologous amino acid or heterologous polypeptide. In some cases, a Cas9 polypeptide of the present disclosure comprises: a) a Cas9 polypeptide; and b) a heterologous amino acid or heterologous polypeptide inserted internally within the Cas9 polypeptide, where the heterologous amino acid or heterologous polypeptide is inserted at a position that is immediately adjacent and N-terminal to an amino acid residue corresponding to amino acid 532 of the Cas9 protein set forth in SEQ ID NO: 5, where the Cas9 fusion polypeptide retains cleavage and/or binding activity relative to the activity of the Cas9 polypeptide without the inserted heterologous amino acid or heterologous polypeptide.

[0306] In some cases, a Cas9 polypeptide of the present disclosure comprises: a) a Cas9 polypeptide; and b) a heterologous amino acid or heterologous polypeptide inserted internally within the Cas9 polypeptide, where the heterologous amino acid or heterologous polypeptide is inserted at a position that is immediately adjacent and C-terminal to an amino acid residue corresponding to amino acid 533 of the Cas9 protein set forth in SEQ ID NO: 5, where the Cas9 fusion polypeptide retains cleavage and/or binding activity relative to the activity of the Cas9 polypeptide without the inserted heterologous amino acid or heterologous polypeptide. In some cases, a Cas9 polypeptide of the present disclosure comprises: a) a Cas9 polypeptide; and b) a heterologous amino acid or heterologous polypeptide inserted internally within the Cas9 polypeptide, where the heterologous amino acid or heterologous polypeptide is inserted at a position that is immediately adjacent and N-terminal to an amino acid residue corresponding to amino acid 533 of the Cas9 protein set forth in SEQ ID NO: 5, where the Cas9 fusion polypeptide retains cleavage and/or binding activity relative to the activity of the Cas9 polypeptide without the inserted heterologous amino acid or heterologous polypeptide.

[0307] In some cases, a Cas9 polypeptide of the present disclosure comprises: a) a Cas9 polypeptide; and b) a heterologous amino acid or heterologous polypeptide inserted internally within the Cas9 polypeptide, where the heterologous amino acid or heterologous polypeptide is inserted at a position that is immediately adjacent and C-terminal to an amino acid residue corresponding to amino acid 536 of the Cas9 protein set forth in SEQ ID NO: 5, where the Cas9 fusion polypeptide retains cleavage and/or binding activity relative to the activity of the Cas9 polypeptide without the inserted heterologous amino acid or heterologous polypeptide. In some cases, a Cas9 polypeptide of the present disclosure comprises: a) a Cas9 polypeptide; and b) a heterologous amino acid or heterologous polypeptide inserted internally within the Cas9 polypeptide, where the heterologous amino acid or heterologous polypeptide is inserted at a position that is immediately adjacent and N-terminal to an amino acid residue corresponding to amino acid 536 of the Cas9 protein set forth in SEQ ID NO: 5, where the Cas9 fusion polypeptide retains cleavage and/or binding activity relative to the activity of the Cas9 polypeptide without the inserted heterologous amino acid or heterologous polypeptide.

[0308] In some cases, a Cas9 polypeptide of the present disclosure comprises: a) a Cas9 polypeptide; and b) a heterologous amino acid or heterologous polypeptide inserted internally within the Cas9 polypeptide, where the heterologous amino acid or heterologous polypeptide is inserted at a position that is immediately adjacent and C-terminal to an amino acid residue corresponding to amino acid 576 of the Cas9 protein set forth in SEQ ID NO: 5, where the Cas9 fusion polypeptide retains cleavage and/or binding activity relative to the activity of the Cas9 polypeptide without the inserted heterologous amino acid or heterologous polypeptide. In some cases, a Cas9 polypeptide of the present disclosure comprises: a) a Cas9 polypeptide; and b) a heterologous amino acid or heterologous polypeptide inserted internally within the Cas9 polypeptide, where the heterologous amino acid or heterologous polypeptide is inserted at a position that is immediately adjacent and N-terminal to an amino acid residue corresponding to amino acid 576 of the Cas9 protein set forth in SEQ ID NO: 5, where the Cas9 fusion polypeptide retains cleavage and/or binding activity relative to the activity of the Cas9 polypeptide without the inserted heterologous amino acid or heterologous polypeptide.

[0309] In some cases, a Cas9 polypeptide of the present disclosure comprises: a) a Cas9 polypeptide; and b) a heterologous amino acid or heterologous polypeptide inserted internally within the Cas9 polypeptide, where the heterologous amino acid or heterologous polypeptide is inserted at a position that is immediately adjacent and C-terminal to an amino acid residue corresponding to amino acid 577 of the Cas9 protein set forth in SEQ ID NO: 5, where the Cas9 fusion polypeptide retains cleavage and/or binding activity relative to the activity of the Cas9 polypeptide without the inserted heterologous amino acid or heterologous polypeptide. In some cases, a Cas9 polypeptide of the present disclosure comprises: a) a Cas9 polypeptide; and b) a heterologous amino acid or heterologous polypeptide inserted internally within the Cas9 polypeptide, where the heterologous amino acid or heterologous polypeptide is inserted at a position that is immediately adjacent and N-terminal to an amino acid residue corresponding to amino acid 577 of the Cas9 protein set forth in SEQ ID NO: 5, where the Cas9 fusion polypeptide retains cleavage and/or binding activity relative to the activity of the Cas9 polypeptide without the inserted heterologous amino acid or heterologous polypeptide.

[0310] In some cases, a Cas9 polypeptide of the present disclosure comprises: a) a Cas9 polypeptide; and b) a heterologous amino acid or heterologous polypeptide inserted internally within the Cas9 polypeptide, where the heterologous amino acid or heterologous polypeptide is inserted at a position that is immediately adjacent and C-terminal to an amino acid residue corresponding to amino acid 579 of the Cas9 protein set forth in SEQ ID NO: 5, where the Cas9 fusion polypeptide retains cleavage and/or binding activity relative to the activity of the Cas9 polypeptide without the inserted heterologous amino acid or heterologous polypeptide. In some cases, a Cas9 polypeptide of the present disclosure comprises: a) a Cas9 polypeptide; and b) a heterologous amino acid or heterologous polypeptide inserted internally within the Cas9 polypeptide, where the heterologous amino acid or heterologous polypeptide is inserted at a position that is immediately adjacent and N-terminal to an amino acid residue corresponding to amino acid 579 of the Cas9 protein set forth in SEQ ID NO: 5, where the Cas9 fusion polypeptide retains cleavage and/or binding activity relative to the activity of the Cas9 polypeptide without the inserted heterologous amino acid or heterologous polypeptide.

[0311] In some cases, a Cas9 polypeptide of the present disclosure comprises: a) a Cas9 polypeptide; and b) a heterologous amino acid or heterologous polypeptide inserted internally within the Cas9 polypeptide, where the heterologous amino acid or heterologous polypeptide is inserted at a position that is immediately adjacent and C-terminal to an amino acid residue corresponding to amino acid 588 of the Cas9 protein set forth in SEQ ID NO: 5, where the Cas9 fusion polypeptide retains cleavage and/or binding activity relative to the activity of the Cas9 polypeptide without the inserted heterologous amino acid or heterologous polypeptide. In some cases, a Cas9 polypeptide of the present disclosure comprises: a) a Cas9 polypeptide; and b) a heterologous amino acid or heterologous polypeptide inserted internally within the Cas9 polypeptide, where the heterologous amino acid or heterologous polypeptide is inserted at a position that is immediately adjacent and N-terminal to an amino acid residue corresponding to amino acid 588 of the Cas9 protein set forth in SEQ ID NO: 5, where the Cas9 fusion polypeptide retains cleavage and/or binding activity relative to the activity of the Cas9 polypeptide without the inserted heterologous amino acid or heterologous polypeptide.

[0312] In some cases, a Cas9 polypeptide of the present disclosure comprises: a) a Cas9 polypeptide; and b) a heterologous amino acid or heterologous polypeptide inserted internally within the Cas9 polypeptide, where the heterologous amino acid or heterologous polypeptide is inserted at a position that is immediately adjacent and C-terminal to an amino acid residue corresponding to amino acid 639 of the Cas9 protein set forth in SEQ ID NO: 5, where the Cas9 fusion polypeptide retains cleavage and/or binding activity relative to the activity of the Cas9 polypeptide without the inserted heterologous amino acid or heterologous polypeptide. In some cases, a Cas9 polypeptide of the present disclosure comprises: a) a Cas9 polypeptide; and b) a heterologous amino acid or heterologous polypeptide inserted internally within the Cas9 polypeptide, where the heterologous amino acid or heterologous polypeptide is inserted at a position that is immediately adjacent and N-terminal to an amino acid residue corresponding to amino acid 639 of the Cas9 protein set forth in SEQ ID NO: 5, where the Cas9 fusion polypeptide retains cleavage and/or binding activity relative to the activity of the Cas9 polypeptide without the inserted heterologous amino acid or heterologous polypeptide.

[0313] In some cases, a Cas9 polypeptide of the present disclosure comprises: a) a Cas9 polypeptide; and b) a heterologous amino acid or heterologous polypeptide inserted internally within the Cas9 polypeptide, where the heterologous amino acid or heterologous polypeptide is inserted at a position that is immediately adjacent and C-terminal to an amino acid residue corresponding to amino acid 641 of the Cas9 protein set forth in SEQ ID NO: 5, where the Cas9 fusion polypeptide retains cleavage and/or binding activity relative to the activity of the Cas9 polypeptide without the inserted heterologous amino acid or heterologous polypeptide. In some cases, a Cas9 polypeptide of the present disclosure comprises: a) a Cas9 polypeptide; and b) a heterologous amino acid or heterologous polypeptide inserted internally within the Cas9 polypeptide, where the heterologous amino acid or heterologous polypeptide is inserted at a position that is immediately adjacent and N-terminal to an amino acid residue corresponding to amino acid 641 of the Cas9 protein set forth in SEQ ID NO: 5, where the Cas9 fusion polypeptide retains cleavage and/or binding activity relative to the activity of the Cas9 polypeptide without the inserted heterologous amino acid or heterologous polypeptide.

[0314] In some cases, a Cas9 polypeptide of the present disclosure comprises: a) a Cas9 polypeptide; and b) a heterologous amino acid or heterologous polypeptide inserted internally within the Cas9 polypeptide, where the heterologous amino acid or heterologous polypeptide is inserted at a position that is immediately adjacent and C-terminal to an amino acid residue corresponding to amino acid 645 of the Cas9 protein set forth in SEQ ID NO: 5, where the Cas9 fusion polypeptide retains cleavage and/or binding activity relative to the activity of the Cas9 polypeptide without the inserted heterologous amino acid or heterologous polypeptide. In some cases, a Cas9 polypeptide of the present disclosure comprises: a) a Cas9 polypeptide; and b) a heterologous amino acid or heterologous polypeptide inserted internally within the Cas9 polypeptide, where the heterologous amino acid or heterologous polypeptide is inserted at a position that is immediately adjacent and N-terminal to an amino acid residue corresponding to amino acid 645 of the Cas9 protein set forth in SEQ ID NO: 5, where the Cas9 fusion polypeptide retains cleavage and/or binding activity relative to the activity of the Cas9 polypeptide without the inserted heterologous amino acid or heterologous polypeptide.

[0315] In some cases, a Cas9 polypeptide of the present disclosure comprises: a) a Cas9 polypeptide; and b) a heterologous amino acid or heterologous polypeptide inserted internally within the Cas9 polypeptide, where the heterologous amino acid or heterologous polypeptide is inserted at a position that is immediately adjacent and C-terminal to an amino acid residue corresponding to amino acid 647 of the Cas9 protein set forth in SEQ ID NO: 5, where the Cas9 fusion polypeptide retains cleavage and/or binding activity relative to the activity of the Cas9 polypeptide without the inserted heterologous amino acid or heterologous polypeptide. In some cases, a Cas9 polypeptide of the present disclosure comprises: a) a Cas9 polypeptide; and b) a heterologous amino acid or heterologous polypeptide inserted internally within the Cas9 polypeptide, where the heterologous amino acid or heterologous polypeptide is inserted at a position that is immediately adjacent and N-terminal to an amino acid residue corresponding to amino acid 647 of the Cas9 protein set forth in SEQ ID NO: 5, where the Cas9 fusion polypeptide retains cleavage and/or binding activity relative to the activity of the Cas9 polypeptide without the inserted heterologous amino acid or heterologous polypeptide.

[0316] In some cases, a Cas9 polypeptide of the present disclosure comprises: a) a Cas9 polypeptide; and b) a heterologous amino acid or heterologous polypeptide inserted internally within the Cas9 polypeptide, where the heterologous amino acid or heterologous polypeptide is inserted at a position that is immediately adjacent and C-terminal to an amino acid residue corresponding to amino acid 687 of the Cas9 protein set forth in SEQ ID NO: 5, where the Cas9 fusion polypeptide retains cleavage and/or binding activity relative to the activity of the Cas9 polypeptide without the inserted heterologous amino acid or heterologous polypeptide. In some cases, a Cas9 polypeptide of the present disclosure comprises: a) a Cas9 polypeptide; and b) a heterologous amino acid or heterologous polypeptide inserted internally within the Cas9 polypeptide, where the heterologous amino acid or heterologous polypeptide is inserted at a position that is immediately adjacent and N-terminal to an amino acid residue corresponding to amino acid 687 of the Cas9 protein set forth in SEQ ID NO: 5, where the Cas9 fusion polypeptide retains cleavage and/or binding activity relative to the activity of the Cas9 polypeptide without the inserted heterologous amino acid or heterologous polypeptide.

[0317] In some cases, a Cas9 polypeptide of the present disclosure comprises: a) a Cas9 polypeptide; and b) a heterologous amino acid or heterologous polypeptide inserted internally within the Cas9 polypeptide, where the heterologous amino acid or heterologous polypeptide is inserted at a position that is immediately adjacent and C-terminal to an amino acid residue corresponding to amino acid 689 of the Cas9 protein set forth in SEQ ID NO: 5, where the Cas9 fusion polypeptide retains cleavage and/or binding activity relative to the activity of the Cas9 polypeptide without the inserted heterologous amino acid or heterologous polypeptide. In some cases, a Cas9 polypeptide of the present disclosure comprises: a) a Cas9 polypeptide; and b) a heterologous amino acid or heterologous polypeptide inserted internally within the Cas9 polypeptide, where the heterologous amino acid or heterologous polypeptide is inserted at a position that is immediately adjacent and N-terminal to an amino acid residue corresponding to amino acid 689 of the Cas9 protein set forth in SEQ ID NO: 5, where the Cas9 fusion polypeptide retains cleavage and/or binding activity relative to the activity of the Cas9 polypeptide without the inserted heterologous amino acid or heterologous polypeptide.

[0318] In some cases, a Cas9 polypeptide of the present disclosure comprises: a) a Cas9 polypeptide; and b) a heterologous amino acid or heterologous polypeptide inserted internally within the Cas9 polypeptide, where the heterologous amino acid or heterologous polypeptide is inserted at a position that is immediately adjacent and C-terminal to an amino acid residue corresponding to amino acid 690 of the Cas9 protein set forth in SEQ ID NO: 5, where the Cas9 fusion polypeptide retains cleavage and/or binding activity relative to the activity of the Cas9 polypeptide without the inserted heterologous amino acid or heterologous polypeptide. In some cases, a Cas9 polypeptide of the present disclosure comprises: a) a Cas9 polypeptide; and b) a heterologous amino acid or heterologous polypeptide inserted internally within the Cas9 polypeptide, where the heterologous amino acid or heterologous polypeptide is inserted at a position that is immediately adjacent and N-terminal to an amino acid residue corresponding to amino acid 690 of the Cas9 protein set forth in SEQ ID NO: 5, where the Cas9 fusion polypeptide retains cleavage and/or binding activity relative to the activity of the Cas9 polypeptide without the inserted heterologous amino acid or heterologous polypeptide.

[0319] In some cases, a Cas9 polypeptide of the present disclosure comprises: a) a Cas9 polypeptide; and b) a heterologous amino acid or heterologous polypeptide inserted internally within the Cas9 polypeptide, where the heterologous amino acid or heterologous polypeptide is inserted at a position that is immediately adjacent and C-terminal to an amino acid residue corresponding to amino acid 692 of the Cas9 protein set forth in SEQ ID NO: 5, where the Cas9 fusion polypeptide retains cleavage and/or binding activity relative to the activity of the Cas9 polypeptide without the inserted heterologous amino acid or heterologous polypeptide. In some cases, a Cas9 polypeptide of the present disclosure comprises: a) a Cas9 polypeptide; and b) a heterologous amino acid or heterologous polypeptide inserted internally within the Cas9 polypeptide, where the heterologous amino acid or heterologous polypeptide is inserted at a position that is immediately adjacent and N-terminal to an amino acid residue corresponding to amino acid 692 of the Cas9 protein set forth in SEQ ID NO: 5, where the Cas9 fusion polypeptide retains cleavage and/or binding activity relative to the activity of the Cas9 polypeptide without the inserted heterologous amino acid or heterologous polypeptide.

[0320] In some cases, a Cas9 polypeptide of the present disclosure comprises: a) a Cas9 polypeptide; and b) a heterologous amino acid or heterologous polypeptide inserted internally within the Cas9 polypeptide, where the heterologous amino acid or heterologous polypeptide is inserted at a position that is immediately adjacent and C-terminal to an amino acid residue corresponding to amino acid 713 of the Cas9 protein set forth in SEQ ID NO: 5, where the Cas9 fusion polypeptide retains cleavage and/or binding activity relative to the activity of the Cas9 polypeptide without the inserted heterologous amino acid or heterologous polypeptide. In some cases, a Cas9 polypeptide of the present disclosure comprises: a) a Cas9 polypeptide; and b) a heterologous amino acid or heterologous polypeptide inserted internally within the Cas9 polypeptide, where the heterologous amino acid or heterologous polypeptide is inserted at a position that is immediately adjacent and N-terminal to an amino acid residue corresponding to amino acid 713 of the Cas9 protein set forth in SEQ ID NO: 5, where the Cas9 fusion polypeptide retains cleavage and/or binding activity relative to the activity of the Cas9 polypeptide without the inserted heterologous amino acid or heterologous polypeptide.

[0321] In some cases, a Cas9 polypeptide of the present disclosure comprises: a) a Cas9 polypeptide; and b) a heterologous amino acid or heterologous polypeptide inserted internally within the Cas9 polypeptide, where the heterologous amino acid or heterologous polypeptide is inserted at a position that is immediately adjacent and C-terminal to an amino acid residue corresponding to amino acid 715 of the Cas9 protein set forth in SEQ ID NO: 5, where the Cas9 fusion polypeptide retains cleavage and/or binding activity relative to the activity of the Cas9 polypeptide without the inserted heterologous amino acid or heterologous polypeptide. In some cases, a Cas9 polypeptide of the present disclosure comprises: a) a Cas9 polypeptide; and b) a heterologous amino acid or heterologous polypeptide inserted internally within the Cas9 polypeptide, where the heterologous amino acid or heterologous polypeptide is inserted at a position that is immediately adjacent and N-terminal to an amino acid residue corresponding to amino acid 715 of the Cas9 protein set forth in SEQ ID NO: 5, where the Cas9 fusion polypeptide retains cleavage and/or binding activity relative to the activity of the Cas9 polypeptide without the inserted heterologous amino acid or heterologous polypeptide.

[0322] In some cases, a Cas9 polypeptide of the present disclosure comprises: a) a Cas9 polypeptide; and b) a heterologous amino acid or heterologous polypeptide inserted internally within the Cas9 polypeptide, where the heterologous amino acid or heterologous polypeptide is inserted at a position that is immediately adjacent and C-terminal to an amino acid residue corresponding to amino acid 717 of the Cas9 protein set forth in SEQ ID NO: 5, where the Cas9 fusion polypeptide retains cleavage and/or binding activity relative to the activity of the Cas9 polypeptide without the inserted heterologous amino acid or heterologous polypeptide. In some cases, a Cas9 polypeptide of the present disclosure comprises: a) a Cas9 polypeptide; and b) a heterologous amino acid or heterologous polypeptide inserted internally within the Cas9 polypeptide, where the heterologous amino acid or heterologous polypeptide is inserted at a position that is immediately adjacent and N-terminal to an amino acid residue corresponding to amino acid 717 of the Cas9 protein set forth in SEQ ID NO: 5, where the Cas9 fusion polypeptide retains cleavage and/or binding activity relative to the activity of the Cas9 polypeptide without the inserted heterologous amino acid or heterologous polypeptide.

[0323] In some cases, a Cas9 polypeptide of the present disclosure comprises: a) a Cas9 polypeptide; and b) a heterologous amino acid or heterologous polypeptide inserted internally within the Cas9 polypeptide, where the heterologous amino acid or heterologous polypeptide is inserted at a position that is immediately adjacent and C-terminal to an amino acid residue corresponding to amino acid 719 of the Cas9 protein set forth in SEQ ID NO: 5, where the Cas9 fusion polypeptide retains cleavage and/or binding activity relative to the activity of the Cas9 polypeptide without the inserted heterologous amino acid or heterologous polypeptide. In some cases, a Cas9 polypeptide of the present disclosure comprises: a) a Cas9 polypeptide; and b) a heterologous amino acid or heterologous polypeptide inserted internally within the Cas9 polypeptide, where the heterologous amino acid or heterologous polypeptide is inserted at a position that is immediately adjacent and N-terminal to an amino acid residue corresponding to amino acid 719 of the Cas9 protein set forth in SEQ ID NO: 5, where the Cas9 fusion polypeptide retains cleavage and/or binding activity relative to the activity of the Cas9 polypeptide without the inserted heterologous amino acid or heterologous polypeptide.

[0324] In some cases, a Cas9 polypeptide of the present disclosure comprises: a) a Cas9 polypeptide; and b) a heterologous amino acid or heterologous polypeptide inserted internally within the Cas9 polypeptide, where the heterologous amino acid or heterologous polypeptide is inserted at a position that is immediately adjacent and C-terminal to an amino acid residue corresponding to amino acid 721 of the Cas9 protein set forth in SEQ ID NO: 5, where the Cas9 fusion polypeptide retains cleavage and/or binding activity relative to the activity of the Cas9 polypeptide without the inserted heterologous amino acid or heterologous polypeptide. In some cases, a Cas9 polypeptide of the present disclosure comprises: a) a Cas9 polypeptide; and b) a heterologous amino acid or heterologous polypeptide inserted internally within the Cas9 polypeptide, where the heterologous amino acid or heterologous polypeptide is inserted at a position that is immediately adjacent and N-terminal to an amino acid residue corresponding to amino acid 721 of the Cas9 protein set forth in SEQ ID NO: 5, where the Cas9 fusion polypeptide retains cleavage and/or binding activity relative to the activity of the Cas9 polypeptide without the inserted heterologous amino acid or heterologous polypeptide.

[0325] In some cases, a Cas9 polypeptide of the present disclosure comprises: a) a Cas9 polypeptide; and b) a heterologous amino acid or heterologous polypeptide inserted internally within the Cas9 polypeptide, where the heterologous amino acid or heterologous polypeptide is inserted at a position that is immediately adjacent and C-terminal to an amino acid residue corresponding to amino acid 724 of the Cas9 protein set forth in SEQ ID NO: 5, where the Cas9 fusion polypeptide retains cleavage and/or binding activity relative to the activity of the Cas9 polypeptide without the inserted heterologous amino acid or heterologous polypeptide. In some cases, a Cas9 polypeptide of the present disclosure comprises: a) a Cas9 polypeptide; and b) a heterologous amino acid or heterologous polypeptide inserted internally within the Cas9 polypeptide, where the heterologous amino acid or heterologous polypeptide is inserted at a position that is immediately adjacent and N-terminal to an amino acid residue corresponding to amino acid 724 of the Cas9 protein set forth in SEQ ID NO: 5, where the Cas9 fusion polypeptide retains cleavage and/or binding activity relative to the activity of the Cas9 polypeptide without the inserted heterologous amino acid or heterologous polypeptide.

[0326] In some cases, a Cas9 polypeptide of the present disclosure comprises: a) a Cas9 polypeptide; and b) a heterologous amino acid or heterologous polypeptide inserted internally within the Cas9 polypeptide, where the heterologous amino acid or heterologous polypeptide is inserted at a position that is immediately adjacent and C-terminal to an amino acid residue corresponding to amino acid 798 of the Cas9 protein set forth in SEQ ID NO: 5, where the Cas9 fusion polypeptide retains cleavage and/or binding activity relative to the activity of the Cas9 polypeptide without the inserted heterologous amino acid or heterologous polypeptide. In some cases, a Cas9 polypeptide of the present disclosure comprises: a) a Cas9 polypeptide; and b) a heterologous amino acid or heterologous polypeptide inserted internally within the Cas9 polypeptide, where the heterologous amino acid or heterologous polypeptide is inserted at a position that is immediately adjacent and N-terminal to an amino acid residue corresponding to amino acid 798 of the Cas9 protein set forth in SEQ ID NO: 5, where the Cas9 fusion polypeptide retains cleavage and/or binding activity relative to the activity of the Cas9 polypeptide without the inserted heterologous amino acid or heterologous polypeptide.

[0327] In some cases, a Cas9 polypeptide of the present disclosure comprises: a) a Cas9 polypeptide; and b) a heterologous amino acid or heterologous polypeptide inserted internally within the Cas9 polypeptide, where the heterologous amino acid or heterologous polypeptide is inserted at a position that is immediately adjacent and C-terminal to an amino acid residue corresponding to amino acid 801 of the Cas9 protein set forth in SEQ ID NO: 5, where the Cas9 fusion polypeptide retains cleavage and/or binding activity relative to the activity of the Cas9 polypeptide without the inserted heterologous amino acid or heterologous polypeptide. In some cases, a Cas9 polypeptide of the present disclosure comprises: a) a Cas9 polypeptide; and b) a heterologous amino acid or heterologous polypeptide inserted internally within the Cas9 polypeptide, where the heterologous amino acid or heterologous polypeptide is inserted at a position that is immediately adjacent and N-terminal to an amino acid residue corresponding to amino acid 801 of the Cas9 protein set forth in SEQ ID NO: 5, where the Cas9 fusion polypeptide retains cleavage and/or binding activity relative to the activity of the Cas9 polypeptide without the inserted heterologous amino acid or heterologous polypeptide.

[0328] In some cases, a Cas9 polypeptide of the present disclosure comprises: a) a Cas9 polypeptide; and b) a heterologous amino acid or heterologous polypeptide inserted internally within the Cas9 polypeptide, where the heterologous amino acid or heterologous polypeptide is inserted at a position that is immediately adjacent and C-terminal to an amino acid residue corresponding to amino acid 802 of the Cas9 protein set forth in SEQ ID NO: 5, where the Cas9 fusion polypeptide retains cleavage and/or binding activity relative to the activity of the Cas9 polypeptide without the inserted heterologous amino acid or heterologous polypeptide. In some cases, a Cas9 polypeptide of the present disclosure comprises: a) a Cas9 polypeptide; and b) a heterologous amino acid or heterologous polypeptide inserted internally within the Cas9 polypeptide, where the heterologous amino acid or heterologous polypeptide is inserted at a position that is immediately adjacent and N-terminal to an amino acid residue corresponding to amino acid 802 of the Cas9 protein set forth in SEQ ID NO: 5, where the Cas9 fusion polypeptide retains cleavage and/or binding activity relative to the activity of the Cas9 polypeptide without the inserted heterologous amino acid or heterologous polypeptide.

[0329] In some cases, a Cas9 polypeptide of the present disclosure comprises: a) a Cas9 polypeptide; and b) a heterologous amino acid or heterologous polypeptide inserted internally within the Cas9 polypeptide, where the heterologous amino acid or heterologous polypeptide is inserted at a position that is immediately adjacent and C-terminal to an amino acid residue corresponding to amino acid 804 of the Cas9 protein set forth in SEQ ID NO: 5, where the Cas9 fusion polypeptide retains cleavage and/or binding activity relative to the activity of the Cas9 polypeptide without the inserted heterologous amino acid or heterologous polypeptide. In some cases, a Cas9 polypeptide of the present disclosure comprises: a) a Cas9 polypeptide; and b) a heterologous amino acid or heterologous polypeptide inserted internally within the Cas9 polypeptide, where the heterologous amino acid or heterologous polypeptide is inserted at a position that is immediately adjacent and N-terminal to an amino acid residue corresponding to amino acid 804 of the Cas9 protein set forth in SEQ ID NO: 5, where the Cas9 fusion polypeptide retains cleavage and/or binding activity relative to the activity of the Cas9 polypeptide without the inserted heterologous amino acid or heterologous polypeptide.

[0330] In some cases, a Cas9 polypeptide of the present disclosure comprises: a) a Cas9 polypeptide; and b) a heterologous amino acid or heterologous polypeptide inserted internally within the Cas9 polypeptide, where the heterologous amino acid or heterologous polypeptide is inserted at a position that is immediately adjacent and C-terminal to an amino acid residue corresponding to amino acid 834 of the Cas9 protein set forth in SEQ ID NO: 5, where the Cas9 fusion polypeptide retains cleavage and/or binding activity relative to the activity of the Cas9 polypeptide without the inserted heterologous amino acid or heterologous polypeptide. In some cases, a Cas9 polypeptide of the present disclosure comprises: a) a Cas9 polypeptide; and b) a heterologous amino acid or heterologous polypeptide inserted internally within the Cas9 polypeptide, where the heterologous amino acid or heterologous polypeptide is inserted at a position that is immediately adjacent and N-terminal to an amino acid residue corresponding to amino acid 834 of the Cas9 protein set forth in SEQ ID NO: 5, where the Cas9 fusion polypeptide retains cleavage and/or binding activity relative to the activity of the Cas9 polypeptide without the inserted heterologous amino acid or heterologous polypeptide.

[0331] In some cases, a Cas9 polypeptide of the present disclosure comprises: a) a Cas9 polypeptide; and b) a heterologous amino acid or heterologous polypeptide inserted internally within the Cas9 polypeptide, where the heterologous amino acid or heterologous polypeptide is inserted at a position that is immediately adjacent and C-terminal to an amino acid residue corresponding to amino acid 868 of the Cas9 protein set forth in SEQ ID NO: 5, where the Cas9 fusion polypeptide retains cleavage and/or binding activity relative to the activity of the Cas9 polypeptide without the inserted heterologous amino acid or heterologous polypeptide. In some cases, a Cas9 polypeptide of the present disclosure comprises: a) a Cas9 polypeptide; and b) a heterologous amino acid or heterologous polypeptide inserted internally within the Cas9 polypeptide, where the heterologous amino acid or heterologous polypeptide is inserted at a position that is immediately adjacent and N-terminal to an amino acid residue corresponding to amino acid 868 of the Cas9 protein set forth in SEQ ID NO: 5, where the Cas9 fusion polypeptide retains cleavage and/or binding activity relative to the activity of the Cas9 polypeptide without the inserted heterologous amino acid or heterologous polypeptide.

[0332] In some cases, a Cas9 polypeptide of the present disclosure comprises: a) a Cas9 polypeptide; and b) a heterologous amino acid or heterologous polypeptide inserted internally within the Cas9 polypeptide, where the heterologous amino acid or heterologous polypeptide is inserted at a position that is immediately adjacent and C-terminal to an amino acid residue corresponding to amino acid 890 of the Cas9 protein set forth in SEQ ID NO: 5, where the Cas9 fusion polypeptide retains cleavage and/or binding activity relative to the activity of the Cas9 polypeptide without the inserted heterologous amino acid or heterologous polypeptide. In some cases, a Cas9 polypeptide of the present disclosure comprises: a) a Cas9 polypeptide; and b) a heterologous amino acid or heterologous polypeptide inserted internally within the Cas9 polypeptide, where the heterologous amino acid or heterologous polypeptide is inserted at a position that is immediately adjacent and N-terminal to an amino acid residue corresponding to amino acid 890 of the Cas9 protein set forth in SEQ ID NO: 5, where the Cas9 fusion polypeptide retains cleavage and/or binding activity relative to the activity of the Cas9 polypeptide without the inserted heterologous amino acid or heterologous polypeptide.

[0333] In some cases, a Cas9 polypeptide of the present disclosure comprises: a) a Cas9 polypeptide; and b) a heterologous amino acid or heterologous polypeptide inserted internally within the Cas9 polypeptide, where the heterologous amino acid or heterologous polypeptide is inserted at a position that is immediately adjacent and C-terminal to an amino acid residue corresponding to amino acid 940 of the Cas9 protein set forth in SEQ ID NO: 5, where the Cas9 fusion polypeptide retains cleavage and/or binding activity relative to the activity of the Cas9 polypeptide without the inserted heterologous amino acid or heterologous polypeptide. In some cases, a Cas9 polypeptide of the present disclosure comprises: a) a Cas9 polypeptide; and b) a heterologous amino acid or heterologous polypeptide inserted internally within the Cas9 polypeptide, where the heterologous amino acid or heterologous polypeptide is inserted at a position that is immediately adjacent and N-terminal to an amino acid residue corresponding to amino acid 940 of the Cas9 protein set forth in SEQ ID NO: 5, where the Cas9 fusion polypeptide retains cleavage and/or binding activity relative to the activity of the Cas9 polypeptide without the inserted heterologous amino acid or heterologous polypeptide.

[0334] In some cases, a Cas9 polypeptide of the present disclosure comprises: a) a Cas9 polypeptide; and b) a heterologous amino acid or heterologous polypeptide inserted internally within the Cas9 polypeptide, where the heterologous amino acid or heterologous polypeptide is inserted at a position that is immediately adjacent and C-terminal to an amino acid residue corresponding to amino acid 941 of the Cas9 protein set forth in SEQ ID NO: 5, where the Cas9 fusion polypeptide retains cleavage and/or binding activity relative to the activity of the Cas9 polypeptide without the inserted heterologous amino acid or heterologous polypeptide. In some cases, a Cas9 polypeptide of the present disclosure comprises: a) a Cas9 polypeptide; and b) a heterologous amino acid or heterologous polypeptide inserted internally within the Cas9 polypeptide, where the heterologous amino acid or heterologous polypeptide is inserted at a position that is immediately adjacent and N-terminal to an amino acid residue corresponding to amino acid 941 of the Cas9 protein set forth in SEQ ID NO: 5, where the Cas9 fusion polypeptide retains cleavage and/or binding activity relative to the activity of the Cas9 polypeptide without the inserted heterologous amino acid or heterologous polypeptide.

[0335] In some cases, a Cas9 polypeptide of the present disclosure comprises: a) a Cas9 polypeptide; and b) a heterologous amino acid or heterologous polypeptide inserted internally within the Cas9 polypeptide, where the heterologous amino acid or heterologous polypeptide is inserted at a position that is immediately adjacent and C-terminal to an amino acid residue corresponding to amino acid 944 of the Cas9 protein set forth in SEQ ID NO: 5, where the Cas9 fusion polypeptide retains cleavage and/or binding activity relative to the activity of the Cas9 polypeptide without the inserted heterologous amino acid or heterologous polypeptide. In some cases, a Cas9 polypeptide of the present disclosure comprises: a) a Cas9 polypeptide; and b) a heterologous amino acid or heterologous polypeptide inserted internally within the Cas9 polypeptide, where the heterologous amino acid or heterologous polypeptide is inserted at a position that is immediately adjacent and N-terminal to an amino acid residue corresponding to amino acid 944 of the Cas9 protein set forth in SEQ ID NO: 5, where the Cas9 fusion polypeptide retains cleavage and/or binding activity relative to the activity of the Cas9 polypeptide without the inserted heterologous amino acid or heterologous polypeptide.

[0336] In some cases, a Cas9 polypeptide of the present disclosure comprises: a) a Cas9 polypeptide; and b) a heterologous amino acid or heterologous polypeptide inserted internally within the Cas9 polypeptide, where the heterologous amino acid or heterologous polypeptide is inserted at a position that is immediately adjacent and C-terminal to an amino acid residue corresponding to amino acid 947 of the Cas9 protein set forth in SEQ ID NO: 5, where the Cas9 fusion polypeptide retains cleavage and/or binding activity relative to the activity of the Cas9 polypeptide without the inserted heterologous amino acid or heterologous polypeptide. In some cases, a Cas9 polypeptide of the present disclosure comprises: a) a Cas9 polypeptide; and b) a heterologous amino acid or heterologous polypeptide inserted internally within the Cas9 polypeptide, where the heterologous amino acid or heterologous polypeptide is inserted at a position that is immediately adjacent and N-terminal to an amino acid residue corresponding to amino acid 947 of the Cas9 protein set forth in SEQ ID NO: 5, where the Cas9 fusion polypeptide retains cleavage and/or binding activity relative to the activity of the Cas9 polypeptide without the inserted heterologous amino acid or heterologous polypeptide.

[0337] In some cases, a Cas9 polypeptide of the present disclosure comprises: a) a Cas9 polypeptide; and b) a heterologous amino acid or heterologous polypeptide inserted internally within the Cas9 polypeptide, where the heterologous amino acid or heterologous polypeptide is inserted at a position that is immediately adjacent and C-terminal to an amino acid residue corresponding to amino acid 952 of the Cas9 protein set forth in SEQ ID NO: 5, where the Cas9 fusion polypeptide retains cleavage and/or binding activity relative to the activity of the Cas9 polypeptide without the inserted heterologous amino acid or heterologous polypeptide. In some cases, a Cas9 polypeptide of the present disclosure comprises: a) a Cas9 polypeptide; and b) a heterologous amino acid or heterologous polypeptide inserted internally within the Cas9 polypeptide, where the heterologous amino acid or heterologous polypeptide is inserted at a position that is immediately adjacent and N-terminal to an amino acid residue corresponding to amino acid 952 of the Cas9 protein set forth in SEQ ID NO: 5, where the Cas9 fusion polypeptide retains cleavage and/or binding activity relative to the activity of the Cas9 polypeptide without the inserted heterologous amino acid or heterologous polypeptide.

[0338] In some cases, a Cas9 polypeptide of the present disclosure comprises: a) a Cas9 polypeptide; and b) a heterologous amino acid or heterologous polypeptide inserted internally within the Cas9 polypeptide, where the heterologous amino acid or heterologous polypeptide is inserted at a position that is immediately adjacent and C-terminal to an amino acid residue corresponding to amino acid 1010 of the Cas9 protein set forth in SEQ ID NO: 5, where the Cas9 fusion polypeptide retains cleavage and/or binding activity relative to the activity of the Cas9 polypeptide without the inserted heterologous amino acid or heterologous polypeptide. In some cases, a Cas9 polypeptide of the present disclosure comprises: a) a Cas9 polypeptide; and b) a heterologous amino acid or heterologous polypeptide inserted internally within the Cas9 polypeptide, where the heterologous amino acid or heterologous polypeptide is inserted at a position that is immediately adjacent and N-terminal to an amino acid residue corresponding to amino acid 1010 of the Cas9 protein set forth in SEQ ID NO: 5, where the Cas9 fusion polypeptide retains cleavage and/or binding activity relative to the activity of the Cas9 polypeptide without the inserted heterologous amino acid or heterologous polypeptide.

[0339] In some cases, a Cas9 polypeptide of the present disclosure comprises: a) a Cas9 polypeptide; and b) a heterologous amino acid or heterologous polypeptide inserted internally within the Cas9 polypeptide, where the heterologous amino acid or heterologous polypeptide is inserted at a position that is immediately adjacent and C-terminal to an amino acid residue corresponding to amino acid 1011 of the Cas9 protein set forth in SEQ ID NO: 5, where the Cas9 fusion polypeptide retains cleavage and/or binding activity relative to the activity of the Cas9 polypeptide without the inserted heterologous amino acid or heterologous polypeptide. In some cases, a Cas9 polypeptide of the present disclosure comprises: a) a Cas9 polypeptide; and b) a heterologous amino acid or heterologous polypeptide inserted internally within the Cas9 polypeptide, where the heterologous amino acid or heterologous polypeptide is inserted at a position that is immediately adjacent and N-terminal to an amino acid residue corresponding to amino acid 1011 of the Cas9 protein set forth in SEQ ID NO: 5, where the Cas9 fusion polypeptide retains cleavage and/or binding activity relative to the activity of the Cas9 polypeptide without the inserted heterologous amino acid or heterologous polypeptide.

[0340] In some cases, a Cas9 polypeptide of the present disclosure comprises: a) a Cas9 polypeptide; and b) a heterologous amino acid or heterologous polypeptide inserted internally within the Cas9 polypeptide, where the heterologous amino acid or heterologous polypeptide is inserted at a position that is immediately adjacent and C-terminal to an amino acid residue corresponding to amino acid 1012 of the Cas9 protein set forth in SEQ ID NO: 5, where the Cas9 fusion polypeptide retains cleavage and/or binding activity relative to the activity of the Cas9 polypeptide without the inserted heterologous amino acid or heterologous polypeptide. In some cases, a Cas9 polypeptide of the present disclosure comprises: a) a Cas9 polypeptide; and b) a heterologous amino acid or heterologous polypeptide inserted internally within the Cas9 polypeptide, where the heterologous amino acid or heterologous polypeptide is inserted at a position that is immediately adjacent and N-terminal to an amino acid residue corresponding to amino acid 1012 of the Cas9 protein set forth in SEQ ID NO: 5, where the Cas9 fusion polypeptide retains cleavage and/or binding activity relative to the activity of the Cas9 polypeptide without the inserted heterologous amino acid or heterologous polypeptide.

[0341] In some cases, a Cas9 polypeptide of the present disclosure comprises: a) a Cas9 polypeptide; and b) a heterologous amino acid or heterologous polypeptide inserted internally within the Cas9 polypeptide, where the heterologous amino acid or heterologous polypeptide is inserted at a position that is immediately adjacent and C-terminal to an amino acid residue corresponding to amino acid 1015 of the Cas9 protein set forth in SEQ ID NO: 5, where the Cas9 fusion polypeptide retains cleavage and/or binding activity relative to the activity of the Cas9 polypeptide without the inserted heterologous amino acid or heterologous polypeptide. In some cases, a Cas9 polypeptide of the present disclosure comprises: a) a Cas9 polypeptide; and b) a heterologous amino acid or heterologous polypeptide inserted internally within the Cas9 polypeptide, where the heterologous amino acid or heterologous polypeptide is inserted at a position that is immediately adjacent and N-terminal to an amino acid residue corresponding to amino acid 1015 of the Cas9 protein set forth in SEQ ID NO: 5, where the Cas9 fusion polypeptide retains cleavage and/or binding activity relative to the activity of the Cas9 polypeptide without the inserted heterologous amino acid or heterologous polypeptide.

[0342] In some cases, a Cas9 polypeptide of the present disclosure comprises: a) a Cas9 polypeptide; and b) a heterologous amino acid or heterologous polypeptide inserted internally within the Cas9 polypeptide, where the heterologous amino acid or heterologous polypeptide is inserted at a position that is immediately adjacent and C-terminal to an amino acid residue corresponding to amino acid 1016 of the Cas9 protein set forth in SEQ ID NO: 5, where the Cas9 fusion polypeptide retains cleavage and/or binding activity relative to the activity of the Cas9 polypeptide without the inserted heterologous amino acid or heterologous polypeptide. In some cases, a Cas9 polypeptide of the present disclosure comprises: a) a Cas9 polypeptide; and b) a heterologous amino acid or heterologous polypeptide inserted internally within the Cas9 polypeptide, where the heterologous amino acid or heterologous polypeptide is inserted at a position that is immediately adjacent and N-terminal to an amino acid residue corresponding to amino acid 1016 of the Cas9 protein set forth in SEQ ID NO: 5, where the Cas9 fusion polypeptide retains cleavage and/or binding activity relative to the activity of the Cas9 polypeptide without the inserted heterologous amino acid or heterologous polypeptide.

[0343] In some cases, a Cas9 polypeptide of the present disclosure comprises: a) a Cas9 polypeptide; and b) a heterologous amino acid or heterologous polypeptide inserted internally within the Cas9 polypeptide, where the heterologous amino acid or heterologous polypeptide is inserted at a position that is immediately adjacent and C-terminal to an amino acid residue corresponding to amino acid 1022 of the Cas9 protein set forth in SEQ ID NO: 5, where the Cas9 fusion polypeptide retains cleavage and/or binding activity relative to the activity of the Cas9 polypeptide without the inserted heterologous amino acid or heterologous polypeptide. In some cases, a Cas9 polypeptide of the present disclosure comprises: a) a Cas9 polypeptide; and b) a heterologous amino acid or heterologous polypeptide inserted internally within the Cas9 polypeptide, where the heterologous amino acid or heterologous polypeptide is inserted at a position that is immediately adjacent and N-terminal to an amino acid residue corresponding to amino acid 1022 of the Cas9 protein set forth in SEQ ID NO: 5, where the Cas9 fusion polypeptide retains cleavage and/or binding activity relative to the activity of the Cas9 polypeptide without the inserted heterologous amino acid or heterologous polypeptide.

[0344] In some cases, a Cas9 polypeptide of the present disclosure comprises: a) a Cas9 polypeptide; and b) a heterologous amino acid or heterologous polypeptide inserted internally within the Cas9 polypeptide, where the heterologous amino acid or heterologous polypeptide is inserted at a position that is immediately adjacent and C-terminal to an amino acid residue corresponding to amino acid 1025 of the Cas9 protein set forth in SEQ ID NO: 5, where the Cas9 fusion polypeptide retains cleavage and/or binding activity relative to the activity of the Cas9 polypeptide without the inserted heterologous amino acid or heterologous polypeptide. In some cases, a Cas9 polypeptide of the present disclosure comprises: a) a Cas9 polypeptide; and b) a heterologous amino acid or heterologous polypeptide inserted internally within the Cas9 polypeptide, where the heterologous amino acid or heterologous polypeptide is inserted at a position that is immediately adjacent and N-terminal to an amino acid residue corresponding to amino acid 1025 of the Cas9 protein set forth in SEQ ID NO: 5, where the Cas9 fusion polypeptide retains cleavage and/or binding activity relative to the activity of the Cas9 polypeptide without the inserted heterologous amino acid or heterologous polypeptide.

[0345] In some cases, a Cas9 polypeptide of the present disclosure comprises: a) a Cas9 polypeptide; and b) a heterologous amino acid or heterologous polypeptide inserted internally within the Cas9 polypeptide, where the heterologous amino acid or heterologous polypeptide is inserted at a position that is immediately adjacent and C-terminal to an amino acid residue corresponding to amino acid 1027 of the Cas9 protein set forth in SEQ ID NO: 5, where the Cas9 fusion polypeptide retains cleavage and/or binding activity relative to the activity of the Cas9 polypeptide without the inserted heterologous amino acid or heterologous polypeptide. In some cases, a Cas9 polypeptide of the present disclosure comprises: a) a Cas9 polypeptide; and b) a heterologous amino acid or heterologous polypeptide inserted internally within the Cas9 polypeptide, where the heterologous amino acid or heterologous polypeptide is inserted at a position that is immediately adjacent and N-terminal to an amino acid residue corresponding to amino acid 1027 of the Cas9 protein set forth in SEQ ID NO: 5, where the Cas9 fusion polypeptide retains cleavage and/or binding activity relative to the activity of the Cas9 polypeptide without the inserted heterologous amino acid or heterologous polypeptide.

[0346] In some cases, a Cas9 polypeptide of the present disclosure comprises: a) a Cas9 polypeptide; and b) a heterologous amino acid or heterologous polypeptide inserted internally within the Cas9 polypeptide, where the heterologous amino acid or heterologous polypeptide is inserted at a position that is immediately adjacent and C-terminal to an amino acid residue corresponding to amino acid 1031 of the Cas9 protein set forth in SEQ ID NO: 5, where the Cas9 fusion polypeptide retains cleavage and/or binding activity relative to the activity of the Cas9 polypeptide without the inserted heterologous amino acid or heterologous polypeptide. In some cases, a Cas9 polypeptide of the present disclosure comprises: a) a Cas9 polypeptide; and b) a heterologous amino acid or heterologous polypeptide inserted internally within the Cas9 polypeptide, where the heterologous amino acid or heterologous polypeptide is inserted at a position that is immediately adjacent and N-terminal to an amino acid residue corresponding to amino acid 1031 of the Cas9 protein set forth in SEQ ID NO: 5, where the Cas9 fusion polypeptide retains cleavage and/or binding activity relative to the activity of the Cas9 polypeptide without the inserted heterologous amino acid or heterologous polypeptide.

[0347] In some cases, a Cas9 polypeptide of the present disclosure comprises: a) a Cas9 polypeptide; and b) a heterologous amino acid or heterologous polypeptide inserted internally within the Cas9 polypeptide, where the heterologous amino acid or heterologous polypeptide is inserted at a position that is immediately adjacent and C-terminal to an amino acid residue corresponding to amino acid 1034 of the Cas9 protein set forth in SEQ ID NO: 5, where the Cas9 fusion polypeptide retains cleavage and/or binding activity relative to the activity of the Cas9 polypeptide without the inserted heterologous amino acid or heterologous polypeptide. In some cases, a Cas9 polypeptide of the present disclosure comprises: a) a Cas9 polypeptide; and b) a heterologous amino acid or heterologous polypeptide inserted internally within the Cas9 polypeptide, where the heterologous amino acid or heterologous polypeptide is inserted at a position that is immediately adjacent and N-terminal to an amino acid residue corresponding to amino acid 1034 of the Cas9 protein set forth in SEQ ID NO: 5, where the Cas9 fusion polypeptide retains cleavage and/or binding activity relative to the activity of the Cas9 polypeptide without the inserted heterologous amino acid or heterologous polypeptide.

[0348] In some cases, a Cas9 polypeptide of the present disclosure comprises: a) a Cas9 polypeptide; and b) a heterologous amino acid or heterologous polypeptide inserted internally within the Cas9 polypeptide, where the heterologous amino acid or heterologous polypeptide is inserted at a position that is immediately adjacent and C-terminal to an amino acid residue corresponding to amino acid 1046 of the Cas9 protein set forth in SEQ ID NO: 5, where the Cas9 fusion polypeptide retains cleavage and/or binding activity relative to the activity of the Cas9 polypeptide without the inserted heterologous amino acid or heterologous polypeptide. In some cases, a Cas9 polypeptide of the present disclosure comprises: a) a Cas9 polypeptide; and b) a heterologous amino acid or heterologous polypeptide inserted internally within the Cas9 polypeptide, where the heterologous amino acid or heterologous polypeptide is inserted at a position that is immediately adjacent and N-terminal to an amino acid residue corresponding to amino acid 1046 of the Cas9 protein set forth in SEQ ID NO: 5, where the Cas9 fusion polypeptide retains cleavage and/or binding activity relative to the activity of the Cas9 polypeptide without the inserted heterologous amino acid or heterologous polypeptide.

[0349] In some cases, a Cas9 polypeptide of the present disclosure comprises: a) a Cas9 polypeptide; and b) a heterologous amino acid or heterologous polypeptide inserted internally within the Cas9 polypeptide, where the heterologous amino acid or heterologous polypeptide is inserted at a position that is immediately adjacent and C-terminal to an amino acid residue corresponding to amino acid 1047 of the Cas9 protein set forth in SEQ ID NO: 5, where the Cas9 fusion polypeptide retains cleavage and/or binding activity relative to the activity of the Cas9 polypeptide without the inserted heterologous amino acid or heterologous polypeptide. In some cases, a Cas9 polypeptide of the present disclosure comprises: a) a Cas9 polypeptide; and b) a heterologous amino acid or heterologous polypeptide inserted internally within the Cas9 polypeptide, where the heterologous amino acid or heterologous polypeptide is inserted at a position that is immediately adjacent and N-terminal to an amino acid residue corresponding to amino acid 1047 of the Cas9 protein set forth in SEQ ID NO: 5, where the Cas9 fusion polypeptide retains cleavage and/or binding activity relative to the activity of the Cas9 polypeptide without the inserted heterologous amino acid or heterologous polypeptide.

[0350] In some cases, a Cas9 polypeptide of the present disclosure comprises: a) a Cas9 polypeptide; and b) a heterologous amino acid or heterologous polypeptide inserted internally within the Cas9 polypeptide, where the heterologous amino acid or heterologous polypeptide is inserted at a position that is immediately adjacent and C-terminal to an amino acid residue corresponding to amino acid 1049 of the Cas9 protein set forth in SEQ ID NO: 5, where the Cas9 fusion polypeptide retains cleavage and/or binding activity relative to the activity of the Cas9 polypeptide without the inserted heterologous amino acid or heterologous polypeptide. In some cases, a Cas9 polypeptide of the present disclosure comprises: a) a Cas9 polypeptide; and b) a heterologous amino acid or heterologous polypeptide inserted internally within the Cas9 polypeptide, where the heterologous amino acid or heterologous polypeptide is inserted at a position that is immediately adjacent and N-terminal to an amino acid residue corresponding to amino acid 1049 of the Cas9 protein set forth in SEQ ID NO: 5, where the Cas9 fusion polypeptide retains cleavage and/or binding activity relative to the activity of the Cas9 polypeptide without the inserted heterologous amino acid or heterologous polypeptide.

[0351] In some cases, a Cas9 polypeptide of the present disclosure comprises: a) a Cas9 polypeptide; and b) a heterologous amino acid or heterologous polypeptide inserted internally within the Cas9 polypeptide, where the heterologous amino acid or heterologous polypeptide is inserted at a position that is immediately adjacent and C-terminal to an amino acid residue corresponding to amino acid 1050 of the Cas9 protein set forth in SEQ ID NO: 5, where the Cas9 fusion polypeptide retains cleavage and/or binding activity relative to the activity of the Cas9 polypeptide without the inserted heterologous amino acid or heterologous polypeptide. In some cases, a Cas9 polypeptide of the present disclosure comprises: a) a Cas9 polypeptide; and b) a heterologous amino acid or heterologous polypeptide inserted internally within the Cas9 polypeptide, where the heterologous amino acid or heterologous polypeptide is inserted at a position that is immediately adjacent and N-terminal to an amino acid residue corresponding to amino acid 1050 of the Cas9 protein set forth in SEQ ID NO: 5, where the Cas9 fusion polypeptide retains cleavage and/or binding activity relative to the activity of the Cas9 polypeptide without the inserted heterologous amino acid or heterologous polypeptide.

[0352] In some cases, a Cas9 polypeptide of the present disclosure comprises: a) a Cas9 polypeptide; and b) a heterologous amino acid or heterologous polypeptide inserted internally within the Cas9 polypeptide, where the heterologous amino acid or heterologous polypeptide is inserted at a position that is immediately adjacent and C-terminal to an amino acid residue corresponding to amino acid 1051 of the Cas9 protein set forth in SEQ ID NO: 5, where the Cas9 fusion polypeptide retains cleavage and/or binding activity relative to the activity of the Cas9 polypeptide without the inserted heterologous amino acid or heterologous polypeptide. In some cases, a Cas9 polypeptide of the present disclosure comprises: a) a Cas9 polypeptide; and b) a heterologous amino acid or heterologous polypeptide inserted internally within the Cas9 polypeptide, where the heterologous amino acid or heterologous polypeptide is inserted at a position that is immediately adjacent and N-terminal to an amino acid residue corresponding to amino acid 1051 of the Cas9 protein set forth in SEQ ID NO: 5, where the Cas9 fusion polypeptide retains cleavage and/or binding activity relative to the activity of the Cas9 polypeptide without the inserted heterologous amino acid or heterologous polypeptide.

[0353] In some cases, a Cas9 polypeptide of the present disclosure comprises: a) a Cas9 polypeptide; and b) a heterologous amino acid or heterologous polypeptide inserted internally within the Cas9 polypeptide, where the heterologous amino acid or heterologous polypeptide is inserted at a position that is immediately adjacent and C-terminal to an amino acid residue corresponding to amino acid 1052 of the Cas9 protein set forth in SEQ ID NO: 5, where the Cas9 fusion polypeptide retains cleavage and/or binding activity relative to the activity of the Cas9 polypeptide without the inserted heterologous amino acid or heterologous polypeptide. In some cases, a Cas9 polypeptide of the present disclosure comprises: a) a Cas9 polypeptide; and b) a heterologous amino acid or heterologous polypeptide inserted internally within the Cas9 polypeptide, where the heterologous amino acid or heterologous polypeptide is inserted at a position that is immediately adjacent and N-terminal to an amino acid residue corresponding to amino acid 1052 of the Cas9 protein set forth in SEQ ID NO: 5, where the Cas9 fusion polypeptide retains cleavage and/or binding activity relative to the activity of the Cas9 polypeptide without the inserted heterologous amino acid or heterologous polypeptide.

[0354] In some cases, a Cas9 polypeptide of the present disclosure comprises: a) a Cas9 polypeptide; and b) a heterologous amino acid or heterologous polypeptide inserted internally within the Cas9 polypeptide, where the heterologous amino acid or heterologous polypeptide is inserted at a position that is immediately adjacent and C-terminal to an amino acid residue corresponding to amino acid 1053 of the Cas9 protein set forth in SEQ ID NO: 5, where the Cas9 fusion polypeptide retains cleavage and/or binding activity relative to the activity of the Cas9 polypeptide without the inserted heterologous amino acid or heterologous polypeptide. In some cases, a Cas9 polypeptide of the present disclosure comprises: a) a Cas9 polypeptide; and b) a heterologous amino acid or heterologous polypeptide inserted internally within the Cas9 polypeptide, where the heterologous amino acid or heterologous polypeptide is inserted at a position that is immediately adjacent and N-terminal to an amino acid residue corresponding to amino acid 1053 of the Cas9 protein set forth in SEQ ID NO: 5, where the Cas9 fusion polypeptide retains cleavage and/or binding activity relative to the activity of the Cas9 polypeptide without the inserted heterologous amino acid or heterologous polypeptide.

[0355] In some cases, a Cas9 polypeptide of the present disclosure comprises: a) a Cas9 polypeptide; and b) a heterologous amino acid or heterologous polypeptide inserted internally within the Cas9 polypeptide, where the heterologous amino acid or heterologous polypeptide is inserted at a position that is immediately adjacent and C-terminal to an amino acid residue corresponding to amino acid 1054 of the Cas9 protein set forth in SEQ ID NO: 5, where the Cas9 fusion polypeptide retains cleavage and/or binding activity relative to the activity of the Cas9 polypeptide without the inserted heterologous amino acid or heterologous polypeptide. In some cases, a Cas9 polypeptide of the present disclosure comprises: a) a Cas9 polypeptide; and b) a heterologous amino acid or heterologous polypeptide inserted internally within the Cas9 polypeptide, where the heterologous amino acid or heterologous polypeptide is inserted at a position that is immediately adjacent and N-terminal to an amino acid residue corresponding to amino acid 1054 of the Cas9 protein set forth in SEQ ID NO: 5, where the Cas9 fusion polypeptide retains cleavage and/or binding activity relative to the activity of the Cas9 polypeptide without the inserted heterologous amino acid or heterologous polypeptide.

[0356] In some cases, a Cas9 polypeptide of the present disclosure comprises: a) a Cas9 polypeptide; and b) a heterologous amino acid or heterologous polypeptide inserted internally within the Cas9 polypeptide, where the heterologous amino acid or heterologous polypeptide is inserted at a position that is immediately adjacent and C-terminal to an amino acid residue corresponding to amino acid 1056 of the Cas9 protein set forth in SEQ ID NO: 5, where the Cas9 fusion polypeptide retains cleavage and/or binding activity relative to the activity of the Cas9 polypeptide without the inserted heterologous amino acid or heterologous polypeptide. In some cases, a Cas9 polypeptide of the present disclosure comprises: a) a Cas9 polypeptide; and b) a heterologous amino acid or heterologous polypeptide inserted internally within the Cas9 polypeptide, where the heterologous amino acid or heterologous polypeptide is inserted at a position that is immediately adjacent and N-terminal to an amino acid residue corresponding to amino acid 1056 of the Cas9 protein set forth in SEQ ID NO: 5, where the Cas9 fusion polypeptide retains cleavage and/or binding activity relative to the activity of the Cas9 polypeptide without the inserted heterologous amino acid or heterologous polypeptide.

[0357] In some cases, a Cas9 polypeptide of the present disclosure comprises: a) a Cas9 polypeptide; and b) a heterologous amino acid or heterologous polypeptide inserted internally within the Cas9 polypeptide, where the heterologous amino acid or heterologous polypeptide is inserted at a position that is immediately adjacent and C-terminal to an amino acid residue corresponding to amino acid 1058 of the Cas9 protein set forth in SEQ ID NO: 5, where the Cas9 fusion polypeptide retains cleavage and/or binding activity relative to the activity of the Cas9 polypeptide without the inserted heterologous amino acid or heterologous polypeptide. In some cases, a Cas9 polypeptide of the present disclosure comprises: a) a Cas9 polypeptide; and b) a heterologous amino acid or heterologous polypeptide inserted internally within the Cas9 polypeptide, where the heterologous amino acid or heterologous polypeptide is inserted at a position that is immediately adjacent and N-terminal to an amino acid residue corresponding to amino acid 1058 of the Cas9 protein set forth in SEQ ID NO: 5, where the Cas9 fusion polypeptide retains cleavage and/or binding activity relative to the activity of the Cas9 polypeptide without the inserted heterologous amino acid or heterologous polypeptide.

[0358] In some cases, a Cas9 polypeptide of the present disclosure comprises: a) a Cas9 polypeptide; and b) a heterologous amino acid or heterologous polypeptide inserted internally within the Cas9 polypeptide, where the heterologous amino acid or heterologous polypeptide is inserted at a position that is immediately adjacent and C-terminal to an amino acid residue corresponding to amino acid 1061 of the Cas9 protein set forth in SEQ ID NO: 5, where the Cas9 fusion polypeptide retains cleavage and/or binding activity relative to the activity of the Cas9 polypeptide without the inserted heterologous amino acid or heterologous polypeptide. In some cases, a Cas9 polypeptide of the present disclosure comprises: a) a Cas9 polypeptide; and b) a heterologous amino acid or heterologous polypeptide inserted internally within the Cas9 polypeptide, where the heterologous amino acid or heterologous polypeptide is inserted at a position that is immediately adjacent and N-terminal to an amino acid residue corresponding to amino acid 1061 of the Cas9 protein set forth in SEQ ID NO: 5, where the Cas9 fusion polypeptide retains cleavage and/or binding activity relative to the activity of the Cas9 polypeptide without the inserted heterologous amino acid or heterologous polypeptide.

[0359] In some cases, a Cas9 polypeptide of the present disclosure comprises: a) a Cas9 polypeptide; and b) a heterologous amino acid or heterologous polypeptide inserted internally within the Cas9 polypeptide, where the heterologous amino acid or heterologous polypeptide is inserted at a position that is immediately adjacent and C-terminal to an amino acid residue corresponding to amino acid 1062 of the Cas9 protein set forth in SEQ ID NO: 5, where the Cas9 fusion polypeptide retains cleavage and/or binding activity relative to the activity of the Cas9 polypeptide without the inserted heterologous amino acid or heterologous polypeptide. In some cases, a Cas9 polypeptide of the present disclosure comprises: a) a Cas9 polypeptide; and b) a heterologous amino acid or heterologous polypeptide inserted internally within the Cas9 polypeptide, where the heterologous amino acid or heterologous polypeptide is inserted at a position that is immediately adjacent and N-terminal to an amino acid residue corresponding to amino acid 1062 of the Cas9 protein set forth in SEQ ID NO: 5, where the Cas9 fusion polypeptide retains cleavage and/or binding activity relative to the activity of the Cas9 polypeptide without the inserted heterologous amino acid or heterologous polypeptide.

[0360] In some cases, a Cas9 polypeptide of the present disclosure comprises: a) a Cas9 polypeptide; and b) a heterologous amino acid or heterologous polypeptide inserted internally within the Cas9 polypeptide, where the heterologous amino acid or heterologous polypeptide is inserted at a position that is immediately adjacent and C-terminal to an amino acid residue corresponding to amino acid 1063 of the Cas9 protein set forth in SEQ ID NO: 5, where the Cas9 fusion polypeptide retains cleavage and/or binding activity relative to the activity of the Cas9 polypeptide without the inserted heterologous amino acid or heterologous polypeptide. In some cases, a Cas9 polypeptide of the present disclosure comprises: a) a Cas9 polypeptide; and b) a heterologous amino acid or heterologous polypeptide inserted internally within the Cas9 polypeptide, where the heterologous amino acid or heterologous polypeptide is inserted at a position that is immediately adjacent and N-terminal to an amino acid residue corresponding to amino acid 1063 of the Cas9 protein set forth in SEQ ID NO: 5, where the Cas9 fusion polypeptide retains cleavage and/or binding activity relative to the activity of the Cas9 polypeptide without the inserted heterologous amino acid or heterologous polypeptide.

[0361] In some cases, a Cas9 polypeptide of the present disclosure comprises: a) a Cas9 polypeptide; and b) a heterologous amino acid or heterologous polypeptide inserted internally within the Cas9 polypeptide, where the heterologous amino acid or heterologous polypeptide is inserted at a position that is immediately adjacent and C-terminal to an amino acid residue corresponding to amino acid 1064 of the Cas9 protein set forth in SEQ ID NO: 5, where the Cas9 fusion polypeptide retains cleavage and/or binding activity relative to the activity of the Cas9 polypeptide without the inserted heterologous amino acid or heterologous polypeptide. In some cases, a Cas9 polypeptide of the present disclosure comprises: a) a Cas9 polypeptide; and b) a heterologous amino acid or heterologous polypeptide inserted internally within the Cas9 polypeptide, where the heterologous amino acid or heterologous polypeptide is inserted at a position that is immediately adjacent and N-terminal to an amino acid residue corresponding to amino acid 1064 of the Cas9 protein set forth in SEQ ID NO: 5, where the Cas9 fusion polypeptide retains cleavage and/or binding activity relative to the activity of the Cas9 polypeptide without the inserted heterologous amino acid or heterologous polypeptide.

[0362] In some cases, a Cas9 polypeptide of the present disclosure comprises: a) a Cas9 polypeptide; and b) a heterologous amino acid or heterologous polypeptide inserted internally within the Cas9 polypeptide, where the heterologous amino acid or heterologous polypeptide is inserted at a position that is immediately adjacent and C-terminal to an amino acid residue corresponding to amino acid 1065 of the Cas9 protein set forth in SEQ ID NO: 5, where the Cas9 fusion polypeptide retains cleavage and/or binding activity relative to the activity of the Cas9 polypeptide without the inserted heterologous amino acid or heterologous polypeptide. In some cases, a Cas9 polypeptide of the present disclosure comprises: a) a Cas9 polypeptide; and b) a heterologous amino acid or heterologous polypeptide inserted internally within the Cas9 polypeptide, where the heterologous amino acid or heterologous polypeptide is inserted at a position that is immediately adjacent and N-terminal to an amino acid residue corresponding to amino acid 1065 of the Cas9 protein set forth in SEQ ID NO: 5, where the Cas9 fusion polypeptide retains cleavage and/or binding activity relative to the activity of the Cas9 polypeptide without the inserted heterologous amino acid or heterologous polypeptide.

[0363] In some cases, a Cas9 polypeptide of the present disclosure comprises: a) a Cas9 polypeptide; and b) a heterologous amino acid or heterologous polypeptide inserted internally within the Cas9 polypeptide, where the heterologous amino acid or heterologous polypeptide is inserted at a position that is immediately adjacent and C-terminal to an amino acid residue corresponding to amino acid 1068 of the Cas9 protein set forth in SEQ ID NO: 5, where the Cas9 fusion polypeptide retains cleavage and/or binding activity relative to the activity of the Cas9 polypeptide without the inserted heterologous amino acid or heterologous polypeptide. In some cases, a Cas9 polypeptide of the present disclosure comprises: a) a Cas9 polypeptide; and b) a heterologous amino acid or heterologous polypeptide inserted internally within the Cas9 polypeptide, where the heterologous amino acid or heterologous polypeptide is inserted at a position that is immediately adjacent and N-terminal to an amino acid residue corresponding to amino acid 1068 of the Cas9 protein set forth in SEQ ID NO: 5, where the Cas9 fusion polypeptide retains cleavage and/or binding activity relative to the activity of the Cas9 polypeptide without the inserted heterologous amino acid or heterologous polypeptide.

[0364] In some cases, a Cas9 polypeptide of the present disclosure comprises: a) a Cas9 polypeptide; and b) a heterologous amino acid or heterologous polypeptide inserted internally within the Cas9 polypeptide, where the heterologous amino acid or heterologous polypeptide is inserted at a position that is immediately adjacent and C-terminal to an amino acid residue corresponding to amino acid 1070 of the Cas9 protein set forth in SEQ ID NO: 5, where the Cas9 fusion polypeptide retains cleavage and/or binding activity relative to the activity of the Cas9 polypeptide without the inserted heterologous amino acid or heterologous polypeptide. In some cases, a Cas9 polypeptide of the present disclosure comprises: a) a Cas9 polypeptide; and b) a heterologous amino acid or heterologous polypeptide inserted internally within the Cas9 polypeptide, where the heterologous amino acid or heterologous polypeptide is inserted at a position that is immediately adjacent and N-terminal to an amino acid residue corresponding to amino acid 1070 of the Cas9 protein set forth in SEQ ID NO: 5, where the Cas9 fusion polypeptide retains cleavage and/or binding activity relative to the activity of the Cas9 polypeptide without the inserted heterologous amino acid or heterologous polypeptide.

[0365] In some cases, a Cas9 polypeptide of the present disclosure comprises: a) a Cas9 polypeptide; and b) a heterologous amino acid or heterologous polypeptide inserted internally within the Cas9 polypeptide, where the heterologous amino acid or heterologous polypeptide is inserted at a position that is immediately adjacent and C-terminal to an amino acid residue corresponding to amino acid 1071 of the Cas9 protein set forth in SEQ ID NO: 5, where the Cas9 fusion polypeptide retains cleavage and/or binding activity relative to the activity of the Cas9 polypeptide without the inserted heterologous amino acid or heterologous polypeptide. In some cases, a Cas9 polypeptide of the present disclosure comprises: a) a Cas9 polypeptide; and b) a heterologous amino acid or heterologous polypeptide inserted internally within the Cas9 polypeptide, where the heterologous amino acid or heterologous polypeptide is inserted at a position that is immediately adjacent and N-terminal to an amino acid residue corresponding to amino acid 1071 of the Cas9 protein set forth in SEQ ID NO: 5, where the Cas9 fusion polypeptide retains cleavage and/or binding activity relative to the activity of the Cas9 polypeptide without the inserted heterologous amino acid or heterologous polypeptide.

[0366] In some cases, a Cas9 polypeptide of the present disclosure comprises: a) a Cas9 polypeptide; and b) a heterologous amino acid or heterologous polypeptide inserted internally within the Cas9 polypeptide, where the heterologous amino acid or heterologous polypeptide is inserted at a position that is immediately adjacent and C-terminal to an amino acid residue corresponding to amino acid 1073 of the Cas9 protein set forth in SEQ ID NO: 5, where the Cas9 fusion polypeptide retains cleavage and/or binding activity relative to the activity of the Cas9 polypeptide without the inserted heterologous amino acid or heterologous polypeptide. In some cases, a Cas9 polypeptide of the present disclosure comprises: a) a Cas9 polypeptide; and b) a heterologous amino acid or heterologous polypeptide inserted internally within the Cas9 polypeptide, where the heterologous amino acid or heterologous polypeptide is inserted at a position that is immediately adjacent and N-terminal to an amino acid residue corresponding to amino acid 1073 of the Cas9 protein set forth in SEQ ID NO: 5, where the Cas9 fusion polypeptide retains cleavage and/or binding activity relative to the activity of the Cas9 polypeptide without the inserted heterologous amino acid or heterologous polypeptide.

[0367] In some cases, a Cas9 polypeptide of the present disclosure comprises: a) a Cas9 polypeptide; and b) a heterologous amino acid or heterologous polypeptide inserted internally within the Cas9 polypeptide, where the heterologous amino acid or heterologous polypeptide is inserted at a position that is immediately adjacent and C-terminal to an amino acid residue corresponding to amino acid 1145 of the Cas9 protein set forth in SEQ ID NO: 5, where the Cas9 fusion polypeptide retains cleavage and/or binding activity relative to the activity of the Cas9 polypeptide without the inserted heterologous amino acid or heterologous polypeptide. In some cases, a Cas9 polypeptide of the present disclosure comprises: a) a Cas9 polypeptide; and b) a heterologous amino acid or heterologous polypeptide inserted internally within the Cas9 polypeptide, where the heterologous amino acid or heterologous polypeptide is inserted at a position that is immediately adjacent and N-terminal to an amino acid residue corresponding to amino acid 1145 of the Cas9 protein set forth in SEQ ID NO: 5, where the Cas9 fusion polypeptide retains cleavage and/or binding activity relative to the activity of the Cas9 polypeptide without the inserted heterologous amino acid or heterologous polypeptide.

[0368] In some cases, a Cas9 polypeptide of the present disclosure comprises: a) a Cas9 polypeptide; and b) a heterologous amino acid or heterologous polypeptide inserted internally within the Cas9 polypeptide, where the heterologous amino acid or heterologous polypeptide is inserted at a position that is immediately adjacent and C-terminal to an amino acid residue corresponding to amino acid 1148 of the Cas9 protein set forth in SEQ ID NO: 5, where the Cas9 fusion polypeptide retains cleavage and/or binding activity relative to the activity of the Cas9 polypeptide without the inserted heterologous amino acid or heterologous polypeptide. In some cases, a Cas9 polypeptide of the present disclosure comprises: a) a Cas9 polypeptide; and b) a heterologous amino acid or heterologous polypeptide inserted internally within the Cas9 polypeptide, where the heterologous amino acid or heterologous polypeptide is inserted at a position that is immediately adjacent and N-terminal to an amino acid residue corresponding to amino acid 1148 of the Cas9 protein set forth in SEQ ID NO: 5, where the Cas9 fusion polypeptide retains cleavage and/or binding activity relative to the activity of the Cas9 polypeptide without the inserted heterologous amino acid or heterologous polypeptide.

[0369] In some cases, a Cas9 polypeptide of the present disclosure comprises: a) a Cas9 polypeptide; and b) a heterologous amino acid or heterologous polypeptide inserted internally within the Cas9 polypeptide, where the heterologous amino acid or heterologous polypeptide is inserted at a position that is immediately adjacent and C-terminal to an amino acid residue corresponding to amino acid 1149 of the Cas9 protein set forth in SEQ ID NO: 5, where the Cas9 fusion polypeptide retains cleavage and/or binding activity relative to the activity of the Cas9 polypeptide without the inserted heterologous amino acid or heterologous polypeptide. In some cases, a Cas9 polypeptide of the present disclosure comprises: a) a Cas9 polypeptide; and b) a heterologous amino acid or heterologous polypeptide inserted internally within the Cas9 polypeptide, where the heterologous amino acid or heterologous polypeptide is inserted at a position that is immediately adjacent and N-terminal to an amino acid residue corresponding to amino acid 1149 of the Cas9 protein set forth in SEQ ID NO: 5, where the Cas9 fusion polypeptide retains cleavage and/or binding activity relative to the activity of the Cas9 polypeptide without the inserted heterologous amino acid or heterologous polypeptide.

[0370] In some cases, a Cas9 polypeptide of the present disclosure comprises: a) a Cas9 polypeptide; and b) a heterologous amino acid or heterologous polypeptide inserted internally within the Cas9 polypeptide, where the heterologous amino acid or heterologous polypeptide is inserted at a position that is immediately adjacent and C-terminal to an amino acid residue corresponding to amino acid 1152 of the Cas9 protein set forth in SEQ ID NO: 5, where the Cas9 fusion polypeptide retains cleavage and/or binding activity relative to the activity of the Cas9 polypeptide without the inserted heterologous amino acid or heterologous polypeptide. In some cases, a Cas9 polypeptide of the present disclosure comprises: a) a Cas9 polypeptide; and b) a heterologous amino acid or heterologous polypeptide inserted internally within the Cas9 polypeptide, where the heterologous amino acid or heterologous polypeptide is inserted at a position that is immediately adjacent and N-terminal to an amino acid residue corresponding to amino acid 1152 of the Cas9 protein set forth in SEQ ID NO: 5, where the Cas9 fusion polypeptide retains cleavage and/or binding activity relative to the activity of the Cas9 polypeptide without the inserted heterologous amino acid or heterologous polypeptide.

[0371] In some cases, a Cas9 polypeptide of the present disclosure comprises: a) a Cas9 polypeptide; and b) a heterologous amino acid or heterologous polypeptide inserted internally within the Cas9 polypeptide, where the heterologous amino acid or heterologous polypeptide is inserted at a position that is immediately adjacent and C-terminal to an amino acid residue corresponding to amino acid 1153 of the Cas9 protein set forth in SEQ ID NO: 5, where the Cas9 fusion polypeptide retains cleavage and/or binding activity relative to the activity of the Cas9 polypeptide without the inserted heterologous amino acid or heterologous polypeptide. In some cases, a Cas9 polypeptide of the present disclosure comprises: a) a Cas9 polypeptide; and b) a heterologous amino acid or heterologous polypeptide inserted internally within the Cas9 polypeptide, where the heterologous amino acid or heterologous polypeptide is inserted at a position that is immediately adjacent and N-terminal to an amino acid residue corresponding to amino acid 1153 of the Cas9 protein set forth in SEQ ID NO: 5, where the Cas9 fusion polypeptide retains cleavage and/or binding activity relative to the activity of the Cas9 polypeptide without the inserted heterologous amino acid or heterologous polypeptide.

[0372] In some cases, a Cas9 polypeptide of the present disclosure comprises: a) a Cas9 polypeptide; and b) a heterologous amino acid or heterologous polypeptide inserted internally within the Cas9 polypeptide, where the heterologous amino acid or heterologous polypeptide is inserted at a position that is immediately adjacent and C-terminal to an amino acid residue corresponding to amino acid 1155 of the Cas9 protein set forth in SEQ ID NO: 5, where the Cas9 fusion polypeptide retains cleavage and/or binding activity relative to the activity of the Cas9 polypeptide without the inserted heterologous amino acid or heterologous polypeptide. In some cases, a Cas9 polypeptide of the present disclosure comprises: a) a Cas9 polypeptide; and b) a heterologous amino acid or heterologous polypeptide inserted internally within the Cas9 polypeptide, where the heterologous amino acid or heterologous polypeptide is inserted at a position that is immediately adjacent and N-terminal to an amino acid residue corresponding to amino acid 1155 of the Cas9 protein set forth in SEQ ID NO: 5, where the Cas9 fusion polypeptide retains cleavage and/or binding activity relative to the activity of the Cas9 polypeptide without the inserted heterologous amino acid or heterologous polypeptide.

[0373] In some cases, a Cas9 polypeptide of the present disclosure comprises: a) a Cas9 polypeptide; and b) a heterologous amino acid or heterologous polypeptide inserted internally within the Cas9 polypeptide, where the heterologous amino acid or heterologous polypeptide is inserted at a position that is immediately adjacent and C-terminal to an amino acid residue corresponding to amino acid 1156 of the Cas9 protein set forth in SEQ ID NO: 5, where the Cas9 fusion polypeptide retains cleavage and/or binding activity relative to the activity of the Cas9 polypeptide without the inserted heterologous amino acid or heterologous polypeptide. In some cases, a Cas9 polypeptide of the present disclosure comprises: a) a Cas9 polypeptide; and b) a heterologous amino acid or heterologous polypeptide inserted internally within the Cas9 polypeptide, where the heterologous amino acid or heterologous polypeptide is inserted at a position that is immediately adjacent and N-terminal to an amino acid residue corresponding to amino acid 1156 of the Cas9 protein set forth in SEQ ID NO: 5, where the Cas9 fusion polypeptide retains cleavage and/or binding activity relative to the activity of the Cas9 polypeptide without the inserted heterologous amino acid or heterologous polypeptide.

[0374] In some cases, a Cas9 polypeptide of the present disclosure comprises: a) a Cas9 polypeptide; and b) a heterologous amino acid or heterologous polypeptide inserted internally within the Cas9 polypeptide, where the heterologous amino acid or heterologous polypeptide is inserted at a position that is immediately adjacent and C-terminal to an amino acid residue corresponding to amino acid 1160 of the Cas9 protein set forth in SEQ ID NO: 5, where the Cas9 fusion polypeptide retains cleavage and/or binding activity relative to the activity of the Cas9 polypeptide without the inserted heterologous amino acid or heterologous polypeptide. In some cases, a Cas9 polypeptide of the present disclosure comprises: a) a Cas9 polypeptide; and b) a heterologous amino acid or heterologous polypeptide inserted internally within the Cas9 polypeptide, where the heterologous amino acid or heterologous polypeptide is inserted at a position that is immediately adjacent and N-terminal to an amino acid residue corresponding to amino acid 1160 of the Cas9 protein set forth in SEQ ID NO: 5, where the Cas9 fusion polypeptide retains cleavage and/or binding activity relative to the activity of the Cas9 polypeptide without the inserted heterologous amino acid or heterologous polypeptide.

[0375] In some cases, a Cas9 polypeptide of the present disclosure comprises: a) a Cas9 polypeptide; and b) a heterologous amino acid or heterologous polypeptide inserted internally within the Cas9 polypeptide, where the heterologous amino acid or heterologous polypeptide is inserted at a position that is immediately adjacent and C-terminal to an amino acid residue corresponding to amino acid 1161 of the Cas9 protein set forth in SEQ ID NO: 5, where the Cas9 fusion polypeptide retains cleavage and/or binding activity relative to the activity of the Cas9 polypeptide without the inserted heterologous amino acid or heterologous polypeptide. In some cases, a Cas9 polypeptide of the present disclosure comprises: a) a Cas9 polypeptide; and b) a heterologous amino acid or heterologous polypeptide inserted internally within the Cas9 polypeptide, where the heterologous amino acid or heterologous polypeptide is inserted at a position that is immediately adjacent and N-terminal to an amino acid residue corresponding to amino acid 1161 of the Cas9 protein set forth in SEQ ID NO: 5, where the Cas9 fusion polypeptide retains cleavage and/or binding activity relative to the activity of the Cas9 polypeptide without the inserted heterologous amino acid or heterologous polypeptide.

[0376] In some cases, a Cas9 polypeptide of the present disclosure comprises: a) a Cas9 polypeptide; and b) a heterologous amino acid or heterologous polypeptide inserted internally within the Cas9 polypeptide, where the heterologous amino acid or heterologous polypeptide is inserted at a position that is immediately adjacent and C-terminal to an amino acid residue corresponding to amino acid 1175 of the Cas9 protein set forth in SEQ ID NO: 5, where the Cas9 fusion polypeptide retains cleavage and/or binding activity relative to the activity of the Cas9 polypeptide without the inserted heterologous amino acid or heterologous polypeptide. In some cases, a Cas9 polypeptide of the present disclosure comprises: a) a Cas9 polypeptide; and b) a heterologous amino acid or heterologous polypeptide inserted internally within the Cas9 polypeptide, where the heterologous amino acid or heterologous polypeptide is inserted at a position that is immediately adjacent and N-terminal to an amino acid residue corresponding to amino acid 1175 of the Cas9 protein set forth in SEQ ID NO: 5, where the Cas9 fusion polypeptide retains cleavage and/or binding activity relative to the activity of the Cas9 polypeptide without the inserted heterologous amino acid or heterologous polypeptide.

[0377] In some cases, a Cas9 polypeptide of the present disclosure comprises: a) a Cas9 polypeptide; and b) a heterologous amino acid or heterologous polypeptide inserted internally within the Cas9 polypeptide, where the heterologous amino acid or heterologous polypeptide is inserted at a position that is immediately adjacent and C-terminal to an amino acid residue corresponding to amino acid 1179 of the Cas9 protein set forth in SEQ ID NO: 5, where the Cas9 fusion polypeptide retains cleavage and/or binding activity relative to the activity of the Cas9 polypeptide without the inserted heterologous amino acid or heterologous polypeptide. In some cases, a Cas9 polypeptide of the present disclosure comprises: a) a Cas9 polypeptide; and b) a heterologous amino acid or heterologous polypeptide inserted internally within the Cas9 polypeptide, where the heterologous amino acid or heterologous polypeptide is inserted at a position that is immediately adjacent and N-terminal to an amino acid residue corresponding to amino acid 1179 of the Cas9 protein set forth in SEQ ID NO: 5, where the Cas9 fusion polypeptide retains cleavage and/or binding activity relative to the activity of the Cas9 polypeptide without the inserted heterologous amino acid or heterologous polypeptide.

[0378] In some cases, a Cas9 polypeptide of the present disclosure comprises: a) a Cas9 polypeptide; and b) a heterologous amino acid or heterologous polypeptide inserted internally within the Cas9 polypeptide, where the heterologous amino acid or heterologous polypeptide is inserted at a position that is immediately adjacent and C-terminal to an amino acid residue corresponding to amino acid 1183 of the Cas9 protein set forth in SEQ ID NO: 5, where the Cas9 fusion polypeptide retains cleavage and/or binding activity relative to the activity of the Cas9 polypeptide without the inserted heterologous amino acid or heterologous polypeptide. In some cases, a Cas9 polypeptide of the present disclosure comprises: a) a Cas9 polypeptide; and b) a heterologous amino acid or heterologous polypeptide inserted internally within the Cas9 polypeptide, where the heterologous amino acid or heterologous polypeptide is inserted at a position that is immediately adjacent and N-terminal to an amino acid residue corresponding to amino acid 1183 of the Cas9 protein set forth in SEQ ID NO: 5, where the Cas9 fusion polypeptide retains cleavage and/or binding activity relative to the activity of the Cas9 polypeptide without the inserted heterologous amino acid or heterologous polypeptide.

[0379] In some cases, a Cas9 polypeptide of the present disclosure comprises: a) a Cas9 polypeptide; and b) a heterologous amino acid or heterologous polypeptide inserted internally within the Cas9 polypeptide, where the heterologous amino acid or heterologous polypeptide is inserted at a position that is immediately adjacent and C-terminal to an amino acid residue corresponding to amino acid 1186 of the Cas9 protein set forth in SEQ ID NO: 5, where the Cas9 fusion polypeptide retains cleavage and/or binding activity relative to the activity of the Cas9 polypeptide without the inserted heterologous amino acid or heterologous polypeptide. In some cases, a Cas9 polypeptide of the present disclosure comprises: a) a Cas9 polypeptide; and b) a heterologous amino acid or heterologous polypeptide inserted internally within the Cas9 polypeptide, where the heterologous amino acid or heterologous polypeptide is inserted at a position that is immediately adjacent and N-terminal to an amino acid residue corresponding to amino acid 1186 of the Cas9 protein set forth in SEQ ID NO: 5, where the Cas9 fusion polypeptide retains cleavage and/or binding activity relative to the activity of the Cas9 polypeptide without the inserted heterologous amino acid or heterologous polypeptide.

[0380] In some cases, a Cas9 polypeptide of the present disclosure comprises: a) a Cas9 polypeptide; and b) a heterologous amino acid or heterologous polypeptide inserted internally within the Cas9 polypeptide, where the heterologous amino acid or heterologous polypeptide is inserted at a position that is immediately adjacent and C-terminal to an amino acid residue corresponding to amino acid 1188 of the Cas9 protein set forth in SEQ ID NO: 5, where the Cas9 fusion polypeptide retains cleavage and/or binding activity relative to the activity of the Cas9 polypeptide without the inserted heterologous amino acid or heterologous polypeptide. In some cases, a Cas9 polypeptide of the present disclosure comprises: a) a Cas9 polypeptide; and b) a heterologous amino acid or heterologous polypeptide inserted internally within the Cas9 polypeptide, where the heterologous amino acid or heterologous polypeptide is inserted at a position that is immediately adjacent and N-terminal to an amino acid residue corresponding to amino acid 1188 of the Cas9 protein set forth in SEQ ID NO: 5, where the Cas9 fusion polypeptide retains cleavage and/or binding activity relative to the activity of the Cas9 polypeptide without the inserted heterologous amino acid or heterologous polypeptide.

[0381] In some cases, a Cas9 polypeptide of the present disclosure comprises: a) a Cas9 polypeptide; and b) a heterologous amino acid or heterologous polypeptide inserted internally within the Cas9 polypeptide, where the heterologous amino acid or heterologous polypeptide is inserted at a position that is immediately adjacent and C-terminal to an amino acid residue corresponding to amino acid 1189 of the Cas9 protein set forth in SEQ ID NO: 5, where the Cas9 fusion polypeptide retains cleavage and/or binding activity relative to the activity of the Cas9 polypeptide without the inserted heterologous amino acid or heterologous polypeptide. In some cases, a Cas9 polypeptide of the present disclosure comprises: a) a Cas9 polypeptide; and b) a heterologous amino acid or heterologous polypeptide inserted internally within the Cas9 polypeptide, where the heterologous amino acid or heterologous polypeptide is inserted at a position that is immediately adjacent and N-terminal to an amino acid residue corresponding to amino acid 1189 of the Cas9 protein set forth in SEQ ID NO: 5, where the Cas9 fusion polypeptide retains cleavage and/or binding activity relative to the activity of the Cas9 polypeptide without the inserted heterologous amino acid or heterologous polypeptide.

[0382] In some cases, a Cas9 polypeptide of the present disclosure comprises: a) a Cas9 polypeptide; and b) a heterologous amino acid or heterologous polypeptide inserted internally within the Cas9 polypeptide, where the heterologous amino acid or heterologous polypeptide is inserted at a position that is immediately adjacent and C-terminal to an amino acid residue corresponding to amino acid 1190 of the Cas9 protein set forth in SEQ ID NO: 5, where the Cas9 fusion polypeptide retains cleavage and/or binding activity relative to the activity of the Cas9 polypeptide without the inserted heterologous amino acid or heterologous polypeptide. In some cases, a Cas9 polypeptide of the present disclosure comprises: a) a Cas9 polypeptide; and b) a heterologous amino acid or heterologous polypeptide inserted internally within the Cas9 polypeptide, where the heterologous amino acid or heterologous polypeptide is inserted at a position that is immediately adjacent and N-terminal to an amino acid residue corresponding to amino acid 1190 of the Cas9 protein set forth in SEQ ID NO: 5, where the Cas9 fusion polypeptide retains cleavage and/or binding activity relative to the activity of the Cas9 polypeptide without the inserted heterologous amino acid or heterologous polypeptide.

[0383] In some cases, a Cas9 polypeptide of the present disclosure comprises: a) a Cas9 polypeptide; and b) a heterologous amino acid or heterologous polypeptide inserted internally within the Cas9 polypeptide, where the heterologous amino acid or heterologous polypeptide is inserted at a position that is immediately adjacent and C-terminal to an amino acid residue corresponding to amino acid 1191 of the Cas9 protein set forth in SEQ ID NO: 5, where the Cas9 fusion polypeptide retains cleavage and/or binding activity relative to the activity of the Cas9 polypeptide without the inserted heterologous amino acid or heterologous polypeptide. In some cases, a Cas9 polypeptide of the present disclosure comprises: a) a Cas9 polypeptide; and b) a heterologous amino acid or heterologous polypeptide inserted internally within the Cas9 polypeptide, where the heterologous amino acid or heterologous polypeptide is inserted at a position that is immediately adjacent and N-terminal to an amino acid residue corresponding to amino acid 1191 of the Cas9 protein set forth in SEQ ID NO: 5, where the Cas9 fusion polypeptide retains cleavage and/or binding activity relative to the activity of the Cas9 polypeptide without the inserted heterologous amino acid or heterologous polypeptide.

[0384] In some cases, a Cas9 polypeptide of the present disclosure comprises: a) a Cas9 polypeptide; and b) a heterologous amino acid or heterologous polypeptide inserted internally within the Cas9 polypeptide, where the heterologous amino acid or heterologous polypeptide is inserted at a position that is immediately adjacent and C-terminal to an amino acid residue corresponding to amino acid 1193 of the Cas9 protein set forth in SEQ ID NO: 5, where the Cas9 fusion polypeptide retains cleavage and/or binding activity relative to the activity of the Cas9 polypeptide without the inserted heterologous amino acid or heterologous polypeptide. In some cases, a Cas9 polypeptide of the present disclosure comprises: a) a Cas9 polypeptide; and b) a heterologous amino acid or heterologous polypeptide inserted internally within the Cas9 polypeptide, where the heterologous amino acid or heterologous polypeptide is inserted at a position that is immediately adjacent and N-terminal to an amino acid residue corresponding to amino acid 1193 of the Cas9 protein set forth in SEQ ID NO: 5, where the Cas9 fusion polypeptide retains cleavage and/or binding activity relative to the activity of the Cas9 polypeptide without the inserted heterologous amino acid or heterologous polypeptide.

[0385] In some cases, a Cas9 polypeptide of the present disclosure comprises: a) a Cas9 polypeptide; and b) a heterologous amino acid or heterologous polypeptide inserted internally within the Cas9 polypeptide, where the heterologous amino acid or heterologous polypeptide is inserted at a position that is immediately adjacent and C-terminal to an amino acid residue corresponding to amino acid 1194 of the Cas9 protein set forth in SEQ ID NO: 5, where the Cas9 fusion polypeptide retains cleavage and/or binding activity relative to the activity of the Cas9 polypeptide without the inserted heterologous amino acid or heterologous polypeptide. In some cases, a Cas9 polypeptide of the present disclosure comprises: a) a Cas9 polypeptide; and b) a heterologous amino acid or heterologous polypeptide inserted internally within the Cas9 polypeptide, where the heterologous amino acid or heterologous polypeptide is inserted at a position that is immediately adjacent and N-terminal to an amino acid residue corresponding to amino acid 1194 of the Cas9 protein set forth in SEQ ID NO: 5, where the Cas9 fusion polypeptide retains cleavage and/or binding activity relative to the activity of the Cas9 polypeptide without the inserted heterologous amino acid or heterologous polypeptide.

[0386] In some cases, a Cas9 polypeptide of the present disclosure comprises: a) a Cas9 polypeptide; and b) a heterologous amino acid or heterologous polypeptide inserted internally within the Cas9 polypeptide, where the heterologous amino acid or heterologous polypeptide is inserted at a position that is immediately adjacent and C-terminal to an amino acid residue corresponding to amino acid 1195 of the Cas9 protein set forth in SEQ ID NO: 5, where the Cas9 fusion polypeptide retains cleavage and/or binding activity relative to the activity of the Cas9 polypeptide without the inserted heterologous amino acid or heterologous polypeptide. In some cases, a Cas9 polypeptide of the present disclosure comprises: a) a Cas9 polypeptide; and b) a heterologous amino acid or heterologous polypeptide inserted internally within the Cas9 polypeptide, where the heterologous amino acid or heterologous polypeptide is inserted at a position that is immediately adjacent and N-terminal to an amino acid residue corresponding to amino acid 1195 of the Cas9 protein set forth in SEQ ID NO: 5, where the Cas9 fusion polypeptide retains cleavage and/or binding activity relative to the activity of the Cas9 polypeptide without the inserted heterologous amino acid or heterologous polypeptide.

[0387] In some cases, a Cas9 polypeptide of the present disclosure comprises: a) a Cas9 polypeptide; and b) a heterologous amino acid or heterologous polypeptide inserted internally within the Cas9 polypeptide, where the heterologous amino acid or heterologous polypeptide is inserted at a position that is immediately adjacent and C-terminal to an amino acid residue corresponding to amino acid 1196 of the Cas9 protein set forth in SEQ ID NO: 5, where the Cas9 fusion polypeptide retains cleavage and/or binding activity relative to the activity of the Cas9 polypeptide without the inserted heterologous amino acid or heterologous polypeptide. In some cases, a Cas9 polypeptide of the present disclosure comprises: a) a Cas9 polypeptide; and b) a heterologous amino acid or heterologous polypeptide inserted internally within the Cas9 polypeptide, where the heterologous amino acid or heterologous polypeptide is inserted at a position that is immediately adjacent and N-terminal to an amino acid residue corresponding to amino acid 1196 of the Cas9 protein set forth in SEQ ID NO: 5, where the Cas9 fusion polypeptide retains cleavage and/or binding activity relative to the activity of the Cas9 polypeptide without the inserted heterologous amino acid or heterologous polypeptide.

[0388] In some cases, a Cas9 polypeptide of the present disclosure comprises: a) a Cas9 polypeptide; and b) a heterologous amino acid or heterologous polypeptide inserted internally within the Cas9 polypeptide, where the heterologous amino acid or heterologous polypeptide is inserted at a position that is immediately adjacent and C-terminal to an amino acid residue corresponding to amino acid 1197 of the Cas9 protein set forth in SEQ ID NO: 5, where the Cas9 fusion polypeptide retains cleavage and/or binding activity relative to the activity of the Cas9 polypeptide without the inserted heterologous amino acid or heterologous polypeptide. In some cases, a Cas9 polypeptide of the present disclosure comprises: a) a Cas9 polypeptide; and b) a heterologous amino acid or heterologous polypeptide inserted internally within the Cas9 polypeptide, where the heterologous amino acid or heterologous polypeptide is inserted at a position that is immediately adjacent and N-terminal to an amino acid residue corresponding to amino acid 1197 of the Cas9 protein set forth in SEQ ID NO: 5, where the Cas9 fusion polypeptide retains cleavage and/or binding activity relative to the activity of the Cas9 polypeptide without the inserted heterologous amino acid or heterologous polypeptide.

[0389] In some cases, a Cas9 polypeptide of the present disclosure comprises: a) a Cas9 polypeptide; and b) a heterologous amino acid or heterologous polypeptide inserted internally within the Cas9 polypeptide, where the heterologous amino acid or heterologous polypeptide is inserted at a position that is immediately adjacent and C-terminal to an amino acid residue corresponding to amino acid 1204 of the Cas9 protein set forth in SEQ ID NO: 5, where the Cas9 fusion polypeptide retains cleavage and/or binding activity relative to the activity of the Cas9 polypeptide without the inserted heterologous amino acid or heterologous polypeptide. In some cases, a Cas9 polypeptide of the present disclosure comprises: a) a Cas9 polypeptide; and b) a heterologous amino acid or heterologous polypeptide inserted internally within the Cas9 polypeptide, where the heterologous amino acid or heterologous polypeptide is inserted at a position that is immediately adjacent and N-terminal to an amino acid residue corresponding to amino acid 1204 of the Cas9 protein set forth in SEQ ID NO: 5, where the Cas9 fusion polypeptide retains cleavage and/or binding activity relative to the activity of the Cas9 polypeptide without the inserted heterologous amino acid or heterologous polypeptide.

[0390] In some cases, a Cas9 polypeptide of the present disclosure comprises: a) a Cas9 polypeptide; and b) a heterologous amino acid or heterologous polypeptide inserted internally within the Cas9 polypeptide, where the heterologous amino acid or heterologous polypeptide is inserted at a position that is immediately adjacent and C-terminal to an amino acid residue corresponding to amino acid 1205 of the Cas9 protein set forth in SEQ ID NO: 5, where the Cas9 fusion polypeptide retains cleavage and/or binding activity relative to the activity of the Cas9 polypeptide without the inserted heterologous amino acid or heterologous polypeptide. In some cases, a Cas9 polypeptide of the present disclosure comprises: a) a Cas9 polypeptide; and b) a heterologous amino acid or heterologous polypeptide inserted internally within the Cas9 polypeptide, where the heterologous amino acid or heterologous polypeptide is inserted at a position that is immediately adjacent and N-terminal to an amino acid residue corresponding to amino acid 1205 of the Cas9 protein set forth in SEQ ID NO: 5, where the Cas9 fusion polypeptide retains cleavage and/or binding activity relative to the activity of the Cas9 polypeptide without the inserted heterologous amino acid or heterologous polypeptide.

[0391] In some cases, a Cas9 polypeptide of the present disclosure comprises: a) a Cas9 polypeptide; and b) a heterologous amino acid or heterologous polypeptide inserted internally within the Cas9 polypeptide, where the heterologous amino acid or heterologous polypeptide is inserted at a position that is immediately adjacent and C-terminal to an amino acid residue corresponding to amino acid 1206 of the Cas9 protein set forth in SEQ ID NO: 5, where the Cas9 fusion polypeptide retains cleavage and/or binding activity relative to the activity of the Cas9 polypeptide without the inserted heterologous amino acid or heterologous polypeptide. In some cases, a Cas9 polypeptide of the present disclosure comprises: a) a Cas9 polypeptide; and b) a heterologous amino acid or heterologous polypeptide inserted internally within the Cas9 polypeptide, where the heterologous amino acid or heterologous polypeptide is inserted at a position that is immediately adjacent and N-terminal to an amino acid residue corresponding to amino acid 1206 of the Cas9 protein set forth in SEQ ID NO: 5, where the Cas9 fusion polypeptide retains cleavage and/or binding activity relative to the activity of the Cas9 polypeptide without the inserted heterologous amino acid or heterologous polypeptide.

[0392] In some cases, a Cas9 polypeptide of the present disclosure comprises: a) a Cas9 polypeptide; and b) a heterologous amino acid or heterologous polypeptide inserted internally within the Cas9 polypeptide, where the heterologous amino acid or heterologous polypeptide is inserted at a position that is immediately adjacent and C-terminal to an amino acid residue corresponding to amino acid 1207 of the Cas9 protein set forth in SEQ ID NO: 5, where the Cas9 fusion polypeptide retains cleavage and/or binding activity relative to the activity of the Cas9 polypeptide without the inserted heterologous amino acid or heterologous polypeptide. In some cases, a Cas9 polypeptide of the present disclosure comprises: a) a Cas9 polypeptide; and b) a heterologous amino acid or heterologous polypeptide inserted internally within the Cas9 polypeptide, where the heterologous amino acid or heterologous polypeptide is inserted at a position that is immediately adjacent and N-terminal to an amino acid residue corresponding to amino acid 1207 of the Cas9 protein set forth in SEQ ID NO: 5, where the Cas9 fusion polypeptide retains cleavage and/or binding activity relative to the activity of the Cas9 polypeptide without the inserted heterologous amino acid or heterologous polypeptide.

[0393] In some cases, a Cas9 polypeptide of the present disclosure comprises: a) a Cas9 polypeptide; and b) a heterologous amino acid or heterologous polypeptide inserted internally within the Cas9 polypeptide, where the heterologous amino acid or heterologous polypeptide is inserted at a position that is immediately adjacent and C-terminal to an amino acid residue corresponding to amino acid 1211 of the Cas9 protein set forth in SEQ ID NO: 5, where the Cas9 fusion polypeptide retains cleavage and/or binding activity relative to the activity of the Cas9 polypeptide without the inserted heterologous amino acid or heterologous polypeptide. In some cases, a Cas9 polypeptide of the present disclosure comprises: a) a Cas9 polypeptide; and b) a heterologous amino acid or heterologous polypeptide inserted internally within the Cas9 polypeptide, where the heterologous amino acid or heterologous polypeptide is inserted at a position that is immediately adjacent and N-terminal to an amino acid residue corresponding to amino acid 1211 of the Cas9 protein set forth in SEQ ID NO: 5, where the Cas9 fusion polypeptide retains cleavage and/or binding activity relative to the activity of the Cas9 polypeptide without the inserted heterologous amino acid or heterologous polypeptide.

[0394] In some cases, a Cas9 polypeptide of the present disclosure comprises: a) a Cas9 polypeptide; and b) a heterologous amino acid or heterologous polypeptide inserted internally within the Cas9 polypeptide, where the heterologous amino acid or heterologous polypeptide is inserted at a position that is immediately adjacent and C-terminal to an amino acid residue corresponding to amino acid 1213 of the Cas9 protein set forth in SEQ ID NO: 5, where the Cas9 fusion polypeptide retains cleavage and/or binding activity relative to the activity of the Cas9 polypeptide without the inserted heterologous amino acid or heterologous polypeptide. In some cases, a Cas9 polypeptide of the present disclosure comprises: a) a Cas9 polypeptide; and b) a heterologous amino acid or heterologous polypeptide inserted internally within the Cas9 polypeptide, where the heterologous amino acid or heterologous polypeptide is inserted at a position that is immediately adjacent and N-terminal to an amino acid residue corresponding to amino acid 1213 of the Cas9 protein set forth in SEQ ID NO: 5, where the Cas9 fusion polypeptide retains cleavage and/or binding activity relative to the activity of the Cas9 polypeptide without the inserted heterologous amino acid or heterologous polypeptide.

[0395] In some cases, a Cas9 polypeptide of the present disclosure comprises: a) a Cas9 polypeptide; and b) a heterologous amino acid or heterologous polypeptide inserted internally within the Cas9 polypeptide, where the heterologous amino acid or heterologous polypeptide is inserted at a position that is immediately adjacent and C-terminal to an amino acid residue corresponding to amino acid 1228 of the Cas9 protein set forth in SEQ ID NO: 5, where the Cas9 fusion polypeptide retains cleavage and/or binding activity relative to the activity of the Cas9 polypeptide without the inserted heterologous amino acid or heterologous polypeptide. In some cases, a Cas9 polypeptide of the present disclosure comprises: a) a Cas9 polypeptide; and b) a heterologous amino acid or heterologous polypeptide inserted internally within the Cas9 polypeptide, where the heterologous amino acid or heterologous polypeptide is inserted at a position that is immediately adjacent and N-terminal to an amino acid residue corresponding to amino acid 1228 of the Cas9 protein set forth in SEQ ID NO: 5, where the Cas9 fusion polypeptide retains cleavage and/or binding activity relative to the activity of the Cas9 polypeptide without the inserted heterologous amino acid or heterologous polypeptide.

[0396] In some cases, a Cas9 polypeptide of the present disclosure comprises: a) a Cas9 polypeptide; and b) a heterologous amino acid or heterologous polypeptide inserted internally within the Cas9 polypeptide, where the heterologous amino acid or heterologous polypeptide is inserted at a position that is immediately adjacent and C-terminal to an amino acid residue corresponding to amino acid 1229 of the Cas9 protein set forth in SEQ ID NO: 5, where the Cas9 fusion polypeptide retains cleavage and/or binding activity relative to the activity of the Cas9 polypeptide without the inserted heterologous amino acid or heterologous polypeptide. In some cases, a Cas9 polypeptide of the present disclosure comprises: a) a Cas9 polypeptide; and b) a heterologous amino acid or heterologous polypeptide inserted internally within the Cas9 polypeptide, where the heterologous amino acid or heterologous polypeptide is inserted at a position that is immediately adjacent and N-terminal to an amino acid residue corresponding to amino acid 1229 of the Cas9 protein set forth in SEQ ID NO: 5, where the Cas9 fusion polypeptide retains cleavage and/or binding activity relative to the activity of the Cas9 polypeptide without the inserted heterologous amino acid or heterologous polypeptide.

[0397] In some cases, a Cas9 polypeptide of the present disclosure comprises: a) a Cas9 polypeptide; and b) a heterologous amino acid or heterologous polypeptide inserted internally within the Cas9 polypeptide, where the heterologous amino acid or heterologous polypeptide is inserted at a position that is immediately adjacent and C-terminal to an amino acid residue corresponding to amino acid 1230 of the Cas9 protein set forth in SEQ ID NO: 5, where the Cas9 fusion polypeptide retains cleavage and/or binding activity relative to the activity of the Cas9 polypeptide without the inserted heterologous amino acid or heterologous polypeptide. In some cases, a Cas9 polypeptide of the present disclosure comprises: a) a Cas9 polypeptide; and b) a heterologous amino acid or heterologous polypeptide inserted internally within the Cas9 polypeptide, where the heterologous amino acid or heterologous polypeptide is inserted at a position that is immediately adjacent and N-terminal to an amino acid residue corresponding to amino acid 1230 of the Cas9 protein set forth in SEQ ID NO: 5, where the Cas9 fusion polypeptide retains cleavage and/or binding activity relative to the activity of the Cas9 polypeptide without the inserted heterologous amino acid or heterologous polypeptide.

[0398] In some cases, a Cas9 polypeptide of the present disclosure comprises: a) a Cas9 polypeptide; and b) a heterologous amino acid or heterologous polypeptide inserted internally within the Cas9 polypeptide, where the heterologous amino acid or heterologous polypeptide is inserted at a position that is immediately adjacent and C-terminal to an amino acid residue corresponding to amino acid 1233 of the Cas9 protein set forth in SEQ ID NO: 5, where the Cas9 fusion polypeptide retains cleavage and/or binding activity relative to the activity of the Cas9 polypeptide without the inserted heterologous amino acid or heterologous polypeptide. In some cases, a Cas9 polypeptide of the present disclosure comprises: a) a Cas9 polypeptide; and b) a heterologous amino acid or heterologous polypeptide inserted internally within the Cas9 polypeptide, where the heterologous amino acid or heterologous polypeptide is inserted at a position that is immediately adjacent and N-terminal to an amino acid residue corresponding to amino acid 1233 of the Cas9 protein set forth in SEQ ID NO: 5, where the Cas9 fusion polypeptide retains cleavage and/or binding activity relative to the activity of the Cas9 polypeptide without the inserted heterologous amino acid or heterologous polypeptide.

[0399] In some cases, a Cas9 polypeptide of the present disclosure comprises: a) a Cas9 polypeptide; and b) a heterologous amino acid or heterologous polypeptide inserted internally within the Cas9 polypeptide, where the heterologous amino acid or heterologous polypeptide is inserted at a position that is immediately adjacent and C-terminal to an amino acid residue corresponding to amino acid 1234 of the Cas9 protein set forth in SEQ ID NO: 5, where the Cas9 fusion polypeptide retains cleavage and/or binding activity relative to the activity of the Cas9 polypeptide without the inserted heterologous amino acid or heterologous polypeptide. In some cases, a Cas9 polypeptide of the present disclosure comprises: a) a Cas9 polypeptide; and b) a heterologous amino acid or heterologous polypeptide inserted internally within the Cas9 polypeptide, where the heterologous amino acid or heterologous polypeptide is inserted at a position that is immediately adjacent and N-terminal to an amino acid residue corresponding to amino acid 1234 of the Cas9 protein set forth in SEQ ID NO: 5, where the Cas9 fusion polypeptide retains cleavage and/or binding activity relative to the activity of the Cas9 polypeptide without the inserted heterologous amino acid or heterologous polypeptide.

[0400] In some cases, a Cas9 polypeptide of the present disclosure comprises: a) a Cas9 polypeptide; and b) a heterologous amino acid or heterologous polypeptide inserted internally within the Cas9 polypeptide, where the heterologous amino acid or heterologous polypeptide is inserted at a position that is immediately adjacent and C-terminal to an amino acid residue corresponding to amino acid 1237 of the Cas9 protein set forth in SEQ ID NO: 5, where the Cas9 fusion polypeptide retains cleavage and/or binding activity relative to the activity of the Cas9 polypeptide without the inserted heterologous amino acid or heterologous polypeptide. In some cases, a Cas9 polypeptide of the present disclosure comprises: a) a Cas9 polypeptide; and b) a heterologous amino acid or heterologous polypeptide inserted internally within the Cas9 polypeptide, where the heterologous amino acid or heterologous polypeptide is inserted at a position that is immediately adjacent and N-terminal to an amino acid residue corresponding to amino acid 1237 of the Cas9 protein set forth in SEQ ID NO: 5, where the Cas9 fusion polypeptide retains cleavage and/or binding activity relative to the activity of the Cas9 polypeptide without the inserted heterologous amino acid or heterologous polypeptide.

[0401] In some cases, a Cas9 polypeptide of the present disclosure comprises: a) a Cas9 polypeptide; and b) a heterologous amino acid or heterologous polypeptide inserted internally within the Cas9 polypeptide, where the heterologous amino acid or heterologous polypeptide is inserted at a position that is immediately adjacent and C-terminal to an amino acid residue corresponding to amino acid 1238 of the Cas9 protein set forth in SEQ ID NO: 5, where the Cas9 fusion polypeptide retains cleavage and/or binding activity relative to the activity of the Cas9 polypeptide without the inserted heterologous amino acid or heterologous polypeptide. In some cases, a Cas9 polypeptide of the present disclosure comprises: a) a Cas9 polypeptide; and b) a heterologous amino acid or heterologous polypeptide inserted internally within the Cas9 polypeptide, where the heterologous amino acid or heterologous polypeptide is inserted at a position that is immediately adjacent and N-terminal to an amino acid residue corresponding to amino acid 1238 of the Cas9 protein set forth in SEQ ID NO: 5, where the Cas9 fusion polypeptide retains cleavage and/or binding activity relative to the activity of the Cas9 polypeptide without the inserted heterologous amino acid or heterologous polypeptide.

[0402] In some cases, a Cas9 polypeptide of the present disclosure comprises: a) a Cas9 polypeptide; and b) a heterologous amino acid or heterologous polypeptide inserted internally within the Cas9 polypeptide, where the heterologous amino acid or heterologous polypeptide is inserted at a position that is immediately adjacent and C-terminal to an amino acid residue corresponding to amino acid 1239 of the Cas9 protein set forth in SEQ ID NO: 5, where the Cas9 fusion polypeptide retains cleavage and/or binding activity relative to the activity of the Cas9 polypeptide without the inserted heterologous amino acid or heterologous polypeptide. In some cases, a Cas9 polypeptide of the present disclosure comprises: a) a Cas9 polypeptide; and b) a heterologous amino acid or heterologous polypeptide inserted internally within the Cas9 polypeptide, where the heterologous amino acid or heterologous polypeptide is inserted at a position that is immediately adjacent and N-terminal to an amino acid residue corresponding to amino acid 1239 of the Cas9 protein set forth in SEQ ID NO: 5, where the Cas9 fusion polypeptide retains cleavage and/or binding activity relative to the activity of the Cas9 polypeptide without the inserted heterologous amino acid or heterologous polypeptide.

[0403] In some cases, a Cas9 polypeptide of the present disclosure comprises: a) a Cas9 polypeptide; and b) a heterologous amino acid or heterologous polypeptide inserted internally within the Cas9 polypeptide, where the heterologous amino acid or heterologous polypeptide is inserted at a position that is immediately adjacent and C-terminal to an amino acid residue corresponding to amino acid 1240 of the Cas9 protein set forth in SEQ ID NO: 5, where the Cas9 fusion polypeptide retains cleavage and/or binding activity relative to the activity of the Cas9 polypeptide without the inserted heterologous amino acid or heterologous polypeptide. In some cases, a Cas9 polypeptide of the present disclosure comprises: a) a Cas9 polypeptide; and b) a heterologous amino acid or heterologous polypeptide inserted internally within the Cas9 polypeptide, where the heterologous amino acid or heterologous polypeptide is inserted at a position that is immediately adjacent and N-terminal to an amino acid residue corresponding to amino acid 1240 of the Cas9 protein set forth in SEQ ID NO: 5, where the Cas9 fusion polypeptide retains cleavage and/or binding activity relative to the activity of the Cas9 polypeptide without the inserted heterologous amino acid or heterologous polypeptide.

[0404] In some cases, a Cas9 polypeptide of the present disclosure comprises: a) a Cas9 polypeptide; and b) a heterologous amino acid or heterologous polypeptide inserted internally within the Cas9 polypeptide, where the heterologous amino acid or heterologous polypeptide is inserted at a position that is immediately adjacent and C-terminal to an amino acid residue corresponding to amino acid 1242 of the Cas9 protein set forth in SEQ ID NO: 5, where the Cas9 fusion polypeptide retains cleavage and/or binding activity relative to the activity of the Cas9 polypeptide without the inserted heterologous amino acid or heterologous polypeptide. In some cases, a Cas9 polypeptide of the present disclosure comprises: a) a Cas9 polypeptide; and b) a heterologous amino acid or heterologous polypeptide inserted internally within the Cas9 polypeptide, where the heterologous amino acid or heterologous polypeptide is inserted at a position that is immediately adjacent and N-terminal to an amino acid residue corresponding to amino acid 1242 of the Cas9 protein set forth in SEQ ID NO: 5, where the Cas9 fusion polypeptide retains cleavage and/or binding activity relative to the activity of the Cas9 polypeptide without the inserted heterologous amino acid or heterologous polypeptide.

[0405] In some cases, a Cas9 polypeptide of the present disclosure comprises: a) a Cas9 polypeptide; and b) a heterologous amino acid or heterologous polypeptide inserted internally within the Cas9 polypeptide, where the heterologous amino acid or heterologous polypeptide is inserted at a position that is immediately adjacent and C-terminal to an amino acid residue corresponding to amino acid 1243 of the Cas9 protein set forth in SEQ ID NO: 5, where the Cas9 fusion polypeptide retains cleavage and/or binding activity relative to the activity of the Cas9 polypeptide without the inserted heterologous amino acid or heterologous polypeptide. In some cases, a Cas9 polypeptide of the present disclosure comprises: a) a Cas9 polypeptide; and b) a heterologous amino acid or heterologous polypeptide inserted internally within the Cas9 polypeptide, where the heterologous amino acid or heterologous polypeptide is inserted at a position that is immediately adjacent and N-terminal to an amino acid residue corresponding to amino acid 1243 of the Cas9 protein set forth in SEQ ID NO: 5, where the Cas9 fusion polypeptide retains cleavage and/or binding activity relative to the activity of the Cas9 polypeptide without the inserted heterologous amino acid or heterologous polypeptide.

[0406] In some cases, a Cas9 polypeptide of the present disclosure comprises: a) a Cas9 polypeptide; and b) a heterologous amino acid or heterologous polypeptide inserted internally within the Cas9 polypeptide, where the heterologous amino acid or heterologous polypeptide is inserted at a position that is immediately adjacent and C-terminal to an amino acid residue corresponding to amino acid 1244 of the Cas9 protein set forth in SEQ ID NO: 5, where the Cas9 fusion polypeptide retains cleavage and/or binding activity relative to the activity of the Cas9 polypeptide without the inserted heterologous amino acid or heterologous polypeptide. In some cases, a Cas9 polypeptide of the present disclosure comprises: a) a Cas9 polypeptide; and b) a heterologous amino acid or heterologous polypeptide inserted internally within the Cas9 polypeptide, where the heterologous amino acid or heterologous polypeptide is inserted at a position that is immediately adjacent and N-terminal to an amino acid residue corresponding to amino acid 1244 of the Cas9 protein set forth in SEQ ID NO: 5, where the Cas9 fusion polypeptide retains cleavage and/or binding activity relative to the activity of the Cas9 polypeptide without the inserted heterologous amino acid or heterologous polypeptide.

[0407] In some cases, a Cas9 polypeptide of the present disclosure comprises: a) a Cas9 polypeptide; and b) a heterologous amino acid or heterologous polypeptide inserted internally within the Cas9 polypeptide, where the heterologous amino acid or heterologous polypeptide is inserted at a position that is immediately adjacent and C-terminal to an amino acid residue corresponding to amino acid 1246 of the Cas9 protein set forth in SEQ ID NO: 5, where the Cas9 fusion polypeptide retains cleavage and/or binding activity relative to the activity of the Cas9 polypeptide without the inserted heterologous amino acid or heterologous polypeptide. In some cases, a Cas9 polypeptide of the present disclosure comprises: a) a Cas9 polypeptide; and b) a heterologous amino acid or heterologous polypeptide inserted internally within the Cas9 polypeptide, where the heterologous amino acid or heterologous polypeptide is inserted at a position that is immediately adjacent and N-terminal to an amino acid residue corresponding to amino acid 1246 of the Cas9 protein set forth in SEQ ID NO: 5, where the Cas9 fusion polypeptide retains cleavage and/or binding activity relative to the activity of the Cas9 polypeptide without the inserted heterologous amino acid or heterologous polypeptide.

[0408] In some cases, a Cas9 polypeptide of the present disclosure comprises: a) a Cas9 polypeptide; and b) a heterologous amino acid or heterologous polypeptide inserted internally within the Cas9 polypeptide, where the heterologous amino acid or heterologous polypeptide is inserted at a position that is immediately adjacent and C-terminal to an amino acid residue corresponding to amino acid 1247 of the Cas9 protein set forth in SEQ ID NO: 5, where the Cas9 fusion polypeptide retains cleavage and/or binding activity relative to the activity of the Cas9 polypeptide without the inserted heterologous amino acid or heterologous polypeptide.

[0409] In some cases, a Cas9 polypeptide of the present disclosure comprises: a) a Cas9 polypeptide; and b) a heterologous amino acid or heterologous polypeptide inserted internally within the Cas9 polypeptide, where the heterologous amino acid or heterologous polypeptide is inserted at a position that is immediately adjacent and C-terminal to an amino acid residue corresponding to amino acid 1248 of the Cas9 protein set forth in SEQ ID NO: 5, where the Cas9 fusion polypeptide retains cleavage and/or binding activity relative to the activity of the Cas9 polypeptide without the inserted heterologous amino acid or heterologous polypeptide. In some cases, a Cas9 polypeptide of the present disclosure comprises: a) a Cas9 polypeptide; and b) a heterologous amino acid or heterologous polypeptide inserted internally within the Cas9 polypeptide, where the heterologous amino acid or heterologous polypeptide is inserted at a position that is immediately adjacent and N-terminal to an amino acid residue corresponding to amino acid 1248 of the Cas9 protein set forth in SEQ ID NO: 5, where the Cas9 fusion polypeptide retains cleavage and/or binding activity relative to the activity of the Cas9 polypeptide without the inserted heterologous amino acid or heterologous polypeptide.

[0410] In some cases, a Cas9 polypeptide of the present disclosure comprises: a) a Cas9 polypeptide; and b) a heterologous amino acid or heterologous polypeptide inserted internally within the Cas9 polypeptide, where the heterologous amino acid or heterologous polypeptide is inserted at a position that is immediately adjacent and C-terminal to an amino acid residue corresponding to amino acid 1250 of the Cas9 protein set forth in SEQ ID NO: 5, where the Cas9 fusion polypeptide retains cleavage and/or binding activity relative to the activity of the Cas9 polypeptide without the inserted heterologous amino acid or heterologous polypeptide. In some cases, a Cas9 polypeptide of the present disclosure comprises: a) a Cas9 polypeptide; and b) a heterologous amino acid or heterologous polypeptide inserted internally within the Cas9 polypeptide, where the heterologous amino acid or heterologous polypeptide is inserted at a position that is immediately adjacent and N-terminal to an amino acid residue corresponding to amino acid 1250 of the Cas9 protein set forth in SEQ ID NO: 5, where the Cas9 fusion polypeptide retains cleavage and/or binding activity relative to the activity of the Cas9 polypeptide without the inserted heterologous amino acid or heterologous polypeptide.

[0411] In some cases, a Cas9 polypeptide of the present disclosure comprises: a) a Cas9 polypeptide; and b) a heterologous amino acid or heterologous polypeptide inserted internally within the Cas9 polypeptide, where the heterologous amino acid or heterologous polypeptide is inserted at a position that is immediately adjacent and C-terminal to an amino acid residue corresponding to amino acid 1251 of the Cas9 protein set forth in SEQ ID NO: 5, where the Cas9 fusion polypeptide retains cleavage and/or binding activity relative to the activity of the Cas9 polypeptide without the inserted heterologous amino acid or heterologous polypeptide. In some cases, a Cas9 polypeptide of the present disclosure comprises: a) a Cas9 polypeptide; and b) a heterologous amino acid or heterologous polypeptide inserted internally within the Cas9 polypeptide, where the heterologous amino acid or heterologous polypeptide is inserted at a position that is immediately adjacent and N-terminal to an amino acid residue corresponding to amino acid 1251 of the Cas9 protein set forth in SEQ ID NO: 5, where the Cas9 fusion polypeptide retains cleavage and/or binding activity relative to the activity of the Cas9 polypeptide without the inserted heterologous amino acid or heterologous polypeptide.

[0412] In some cases, a Cas9 polypeptide of the present disclosure comprises: a) a Cas9 polypeptide; and b) a heterologous amino acid or heterologous polypeptide inserted internally within the Cas9 polypeptide, where the heterologous amino acid or heterologous polypeptide is inserted at a position that is immediately adjacent and C-terminal to an amino acid residue corresponding to amino acid 1252 of the Cas9 protein set forth in SEQ ID NO: 5, where the Cas9 fusion polypeptide retains cleavage and/or binding activity relative to the activity of the Cas9 polypeptide without the inserted heterologous amino acid or heterologous polypeptide. In some cases, a Cas9 polypeptide of the present disclosure comprises: a) a Cas9 polypeptide; and b) a heterologous amino acid or heterologous polypeptide inserted internally within the Cas9 polypeptide, where the heterologous amino acid or heterologous polypeptide is inserted at a position that is immediately adjacent and N-terminal to an amino acid residue corresponding to amino acid 1252 of the Cas9 protein set forth in SEQ ID NO: 5, where the Cas9 fusion polypeptide retains cleavage and/or binding activity relative to the activity of the Cas9 polypeptide without the inserted heterologous amino acid or heterologous polypeptide.

[0413] In some cases, a Cas9 polypeptide of the present disclosure comprises: a) a Cas9 polypeptide; and b) a heterologous amino acid or heterologous polypeptide inserted internally within the Cas9 polypeptide, where the heterologous amino acid or heterologous polypeptide is inserted at a position that is immediately adjacent and C-terminal to an amino acid residue corresponding to amino acid 1253 of the Cas9 protein set forth in SEQ ID NO: 5, where the Cas9 fusion polypeptide retains cleavage and/or binding activity relative to the activity of the Cas9 polypeptide without the inserted heterologous amino acid or heterologous polypeptide.

[0414] In some cases, a Cas9 polypeptide of the present disclosure comprises: a) a Cas9 polypeptide; and b) a heterologous amino acid or heterologous polypeptide inserted internally within the Cas9 polypeptide, where the heterologous amino acid or heterologous polypeptide is inserted at a position that is immediately adjacent and C-terminal to an amino acid residue corresponding to amino acid 1255 of the Cas9 protein set forth in SEQ ID NO: 5, where the Cas9 fusion polypeptide retains cleavage and/or binding activity relative to the activity of the Cas9 polypeptide without the inserted heterologous amino acid or heterologous polypeptide. In some cases, a Cas9 polypeptide of the present disclosure comprises: a) a Cas9 polypeptide; and b) a heterologous amino acid or heterologous polypeptide inserted internally within the Cas9 polypeptide, where the heterologous amino acid or heterologous polypeptide is inserted at a position that is immediately adjacent and N-terminal to an amino acid residue corresponding to amino acid 1255 of the Cas9 protein set forth in SEQ ID NO: 5, where the Cas9 fusion polypeptide retains cleavage and/or binding activity relative to the activity of the Cas9 polypeptide without the inserted heterologous amino acid or heterologous polypeptide.

[0415] In some cases, a Cas9 polypeptide of the present disclosure comprises: a) a Cas9 polypeptide; and b) a heterologous amino acid or heterologous polypeptide inserted internally within the Cas9 polypeptide, where the heterologous amino acid or heterologous polypeptide is inserted at a position that is immediately adjacent and C-terminal to an amino acid residue corresponding to amino acid 1259 of the Cas9 protein set forth in SEQ ID NO: 5, where the Cas9 fusion polypeptide retains cleavage and/or binding activity relative to the activity of the Cas9 polypeptide without the inserted heterologous amino acid or heterologous polypeptide. In some cases, a Cas9 polypeptide of the present disclosure comprises: a) a Cas9 polypeptide; and b) a heterologous amino acid or heterologous polypeptide inserted internally within the Cas9 polypeptide, where the heterologous amino acid or heterologous polypeptide is inserted at a position that is immediately adjacent and N-terminal to an amino acid residue corresponding to amino acid 1259 of the Cas9 protein set forth in SEQ ID NO: 5, where the Cas9 fusion polypeptide retains cleavage and/or binding activity relative to the activity of the Cas9 polypeptide without the inserted heterologous amino acid or heterologous polypeptide.

[0416] In some cases, a Cas9 polypeptide of the present disclosure comprises: a) a Cas9 polypeptide; and b) a heterologous amino acid or heterologous polypeptide inserted internally within the Cas9 polypeptide, where the heterologous amino acid or heterologous polypeptide is inserted at a position that is immediately adjacent and C-terminal to an amino acid residue corresponding to amino acid 1260 of the Cas9 protein set forth in SEQ ID NO: 5, where the Cas9 fusion polypeptide retains cleavage and/or binding activity relative to the activity of the Cas9 polypeptide without the inserted heterologous amino acid or heterologous polypeptide. In some cases, a Cas9 polypeptide of the present disclosure comprises: a) a Cas9 polypeptide; and b) a heterologous amino acid or heterologous polypeptide inserted internally within the Cas9 polypeptide, where the heterologous amino acid or heterologous polypeptide is inserted at a position that is immediately adjacent and N-terminal to an amino acid residue corresponding to amino acid 1260 of the Cas9 protein set forth in SEQ ID NO: 5, where the Cas9 fusion polypeptide retains cleavage and/or binding activity relative to the activity of the Cas9 polypeptide without the inserted heterologous amino acid or heterologous polypeptide.

[0417] In some cases, a Cas9 polypeptide of the present disclosure comprises: a) a Cas9 polypeptide; and b) a heterologous amino acid or heterologous polypeptide inserted internally within the Cas9 polypeptide, where the heterologous amino acid or heterologous polypeptide is inserted at a position that is immediately adjacent and C-terminal to an amino acid residue corresponding to amino acid 1262 of the Cas9 protein set forth in SEQ ID NO: 5, where the Cas9 fusion polypeptide retains cleavage and/or binding activity relative to the activity of the Cas9 polypeptide without the inserted heterologous amino acid or heterologous polypeptide. In some cases, a Cas9 polypeptide of the present disclosure comprises: a) a Cas9 polypeptide; and b) a heterologous amino acid or heterologous polypeptide inserted internally within the Cas9 polypeptide, where the heterologous amino acid or heterologous polypeptide is inserted at a position that is immediately adjacent and N-terminal to an amino acid residue corresponding to amino acid 1262 of the Cas9 protein set forth in SEQ ID NO: 5, where the Cas9 fusion polypeptide retains cleavage and/or binding activity relative to the activity of the Cas9 polypeptide without the inserted heterologous amino acid or heterologous polypeptide.

[0418] In some cases, a Cas9 polypeptide of the present disclosure comprises: a) a Cas9 polypeptide; and b) a heterologous amino acid or heterologous polypeptide inserted internally within the Cas9 polypeptide, where the heterologous amino acid or heterologous polypeptide is inserted at a position that is immediately adjacent and C-terminal to an amino acid residue corresponding to amino acid 1267 of the Cas9 protein set forth in SEQ ID NO: 5, where the Cas9 fusion polypeptide retains cleavage and/or binding activity relative to the activity of the Cas9 polypeptide without the inserted heterologous amino acid or heterologous polypeptide. In some cases, a Cas9 polypeptide of the present disclosure comprises: a) a Cas9 polypeptide; and b) a heterologous amino acid or heterologous polypeptide inserted internally within the Cas9 polypeptide, where the heterologous amino acid or heterologous polypeptide is inserted at a position that is immediately adjacent and N-terminal to an amino acid residue corresponding to amino acid 1267 of the Cas9 protein set forth in SEQ ID NO: 5, where the Cas9 fusion polypeptide retains cleavage and/or binding activity relative to the activity of the Cas9 polypeptide without the inserted heterologous amino acid or heterologous polypeptide.

[0419] In some cases, a Cas9 polypeptide of the present disclosure comprises: a) a Cas9 polypeptide; and b) a heterologous amino acid or heterologous polypeptide inserted internally within the Cas9 polypeptide, where the heterologous amino acid or heterologous polypeptide is inserted at a position that is immediately adjacent and C-terminal to an amino acid residue corresponding to amino acid 1268 of the Cas9 protein set forth in SEQ ID NO: 5, where the Cas9 fusion polypeptide retains cleavage and/or binding activity relative to the activity of the Cas9 polypeptide without the inserted heterologous amino acid or heterologous polypeptide. In some cases, a Cas9 polypeptide of the present disclosure comprises: a) a Cas9 polypeptide; and b) a heterologous amino acid or heterologous polypeptide inserted internally within the Cas9 polypeptide, where the heterologous amino acid or heterologous polypeptide is inserted at a position that is immediately adjacent and N-terminal to an amino acid residue corresponding to amino acid 1268 of the Cas9 protein set forth in SEQ ID NO: 5, where the Cas9 fusion polypeptide retains cleavage and/or binding activity relative to the activity of the Cas9 polypeptide without the inserted heterologous amino acid or heterologous polypeptide.

[0420] In some cases, a Cas9 polypeptide of the present disclosure comprises: a) a Cas9 polypeptide; and b) a heterologous amino acid or heterologous polypeptide inserted internally within the Cas9 polypeptide, where the heterologous amino acid or heterologous polypeptide is inserted at a position that is immediately adjacent and C-terminal to an amino acid residue corresponding to amino acid 1269 of the Cas9 protein set forth in SEQ ID NO: 5, where the Cas9 fusion polypeptide retains cleavage and/or binding activity relative to the activity of the Cas9 polypeptide without the inserted heterologous amino acid or heterologous polypeptide. In some cases, a Cas9 polypeptide of the present disclosure comprises: a) a Cas9 polypeptide; and b) a heterologous amino acid or heterologous polypeptide inserted internally within the Cas9 polypeptide, where the heterologous amino acid or heterologous polypeptide is inserted at a position that is immediately adjacent and N-terminal to an amino acid residue corresponding to amino acid 1269 of the Cas9 protein set forth in SEQ ID NO: 5, where the Cas9 fusion polypeptide retains cleavage and/or binding activity relative to the activity of the Cas9 polypeptide without the inserted heterologous amino acid or heterologous polypeptide.

[0421] In some cases, a Cas9 polypeptide of the present disclosure comprises: a) a Cas9 polypeptide; and b) a heterologous amino acid or heterologous polypeptide inserted internally within the Cas9 polypeptide, where the heterologous amino acid or heterologous polypeptide is inserted at a position that is immediately adjacent and C-terminal to an amino acid residue corresponding to amino acid 1270 of the Cas9 protein set forth in SEQ ID NO: 5, where the Cas9 fusion polypeptide retains cleavage and/or binding activity relative to the activity of the Cas9 polypeptide without the inserted heterologous amino acid or heterologous polypeptide. In some cases, a Cas9 polypeptide of the present disclosure comprises: a) a Cas9 polypeptide; and b) a heterologous amino acid or heterologous polypeptide inserted internally within the Cas9 polypeptide, where the heterologous amino acid or heterologous polypeptide is inserted at a position that is immediately adjacent and N-terminal to an amino acid residue corresponding to amino acid 1270 of the Cas9 protein set forth in SEQ ID NO: 5, where the Cas9 fusion polypeptide retains cleavage and/or binding activity relative to the activity of the Cas9 polypeptide without the inserted heterologous amino acid or heterologous polypeptide.

[0422] In some cases, a Cas9 polypeptide of the present disclosure comprises: a) a Cas9 polypeptide; and b) a heterologous amino acid or heterologous polypeptide inserted internally within the Cas9 polypeptide, where the heterologous amino acid or heterologous polypeptide is inserted at a position that is immediately adjacent and C-terminal to an amino acid residue corresponding to amino acid 1281 of the Cas9 protein set forth in SEQ ID NO: 5, where the Cas9 fusion polypeptide retains cleavage and/or binding activity relative to the activity of the Cas9 polypeptide without the inserted heterologous amino acid or heterologous polypeptide. In some cases, a Cas9 polypeptide of the present disclosure comprises: a) a Cas9 polypeptide; and b) a heterologous amino acid or heterologous polypeptide inserted internally within the Cas9 polypeptide, where the heterologous amino acid or heterologous polypeptide is inserted at a position that is immediately adjacent and N-terminal to an amino acid residue corresponding to amino acid 1281 of the Cas9 protein set forth in SEQ ID NO: 5, where the Cas9 fusion polypeptide retains cleavage and/or binding activity relative to the activity of the Cas9 polypeptide without the inserted heterologous amino acid or heterologous polypeptide.

[0423] In some cases, a Cas9 polypeptide of the present disclosure comprises: a) a Cas9 polypeptide; and b) a heterologous amino acid or heterologous polypeptide inserted internally within the Cas9 polypeptide, where the heterologous amino acid or heterologous polypeptide is inserted at a position that is immediately adjacent and C-terminal to an amino acid residue corresponding to amino acid 1282 of the Cas9 protein set forth in SEQ ID NO: 5, where the Cas9 fusion polypeptide retains cleavage and/or binding activity relative to the activity of the Cas9 polypeptide without the inserted heterologous amino acid or heterologous polypeptide. In some cases, a Cas9 polypeptide of the present disclosure comprises: a) a Cas9 polypeptide; and b) a heterologous amino acid or heterologous polypeptide inserted internally within the Cas9 polypeptide, where the heterologous amino acid or heterologous polypeptide is inserted at a position that is immediately adjacent and N-terminal to an amino acid residue corresponding to amino acid 1282 of the Cas9 protein set forth in SEQ ID NO: 5, where the Cas9 fusion polypeptide retains cleavage and/or binding activity relative to the activity of the Cas9 polypeptide without the inserted heterologous amino acid or heterologous polypeptide.

[0424] In some cases, a Cas9 polypeptide of the present disclosure comprises: a) a Cas9 polypeptide; and b) a heterologous amino acid or heterologous polypeptide inserted internally within the Cas9 polypeptide, where the heterologous amino acid or heterologous polypeptide is inserted at a position that is immediately adjacent and C-terminal to an amino acid residue corresponding to amino acid 1283 of the Cas9 protein set forth in SEQ ID NO: 5, where the Cas9 fusion polypeptide retains cleavage and/or binding activity relative to the activity of the Cas9 polypeptide without the inserted heterologous amino acid or heterologous polypeptide. In some cases, a Cas9 polypeptide of the present disclosure comprises: a) a Cas9 polypeptide; and b) a heterologous amino acid or heterologous polypeptide inserted internally within the Cas9 polypeptide, where the heterologous amino acid or heterologous polypeptide is inserted at a position that is immediately adjacent and N-terminal to an amino acid residue corresponding to amino acid 1283 of the Cas9 protein set forth in SEQ ID NO: 5, where the Cas9 fusion polypeptide retains cleavage and/or binding activity relative to the activity of the Cas9 polypeptide without the inserted heterologous amino acid or heterologous polypeptide.

[0425] In some cases, a Cas9 polypeptide of the present disclosure comprises: a) a Cas9 polypeptide; and b) a heterologous amino acid or heterologous polypeptide inserted internally within the Cas9 polypeptide, where the heterologous amino acid or heterologous polypeptide is inserted at a position that is immediately adjacent and C-terminal to an amino acid residue corresponding to amino acid 1284 of the Cas9 protein set forth in SEQ ID NO: 5, where the Cas9 fusion polypeptide retains cleavage and/or binding activity relative to the activity of the Cas9 polypeptide without the inserted heterologous amino acid or heterologous polypeptide. In some cases, a Cas9 polypeptide of the present disclosure comprises: a) a Cas9 polypeptide; and b) a heterologous amino acid or heterologous polypeptide inserted internally within the Cas9 polypeptide, where the heterologous amino acid or heterologous polypeptide is inserted at a position that is immediately adjacent and N-terminal to an amino acid residue corresponding to amino acid 1284 of the Cas9 protein set forth in SEQ ID NO: 5, where the Cas9 fusion polypeptide retains cleavage and/or binding activity relative to the activity of the Cas9 polypeptide without the inserted heterologous amino acid or heterologous polypeptide.

[0426] In some cases, a Cas9 polypeptide of the present disclosure comprises: a) a Cas9 polypeptide; and b) a heterologous amino acid or heterologous polypeptide inserted internally within the Cas9 polypeptide, where the heterologous amino acid or heterologous polypeptide is inserted at a position that is immediately adjacent and C-terminal to an amino acid residue corresponding to amino acid 1287 of the Cas9 protein set forth in SEQ ID NO: 5, where the Cas9 fusion polypeptide retains cleavage and/or binding activity relative to the activity of the Cas9 polypeptide without the inserted heterologous amino acid or heterologous polypeptide. In some cases, a Cas9 polypeptide of the present disclosure comprises: a) a Cas9 polypeptide; and b) a heterologous amino acid or heterologous polypeptide inserted internally within the Cas9 polypeptide, where the heterologous amino acid or heterologous polypeptide is inserted at a position that is immediately adjacent and N-terminal to an amino acid residue corresponding to amino acid 1287 of the Cas9 protein set forth in SEQ ID NO: 5, where the Cas9 fusion polypeptide retains cleavage and/or binding activity relative to the activity of the Cas9 polypeptide without the inserted heterologous amino acid or heterologous polypeptide.

[0427] In some cases, a Cas9 polypeptide of the present disclosure comprises: a) a Cas9 polypeptide; and b) a heterologous amino acid or heterologous polypeptide inserted internally within the Cas9 polypeptide, where the heterologous amino acid or heterologous polypeptide is inserted at a position that is immediately adjacent and C-terminal to an amino acid residue corresponding to amino acid 1289 of the Cas9 protein set forth in SEQ ID NO: 5, where the Cas9 fusion polypeptide retains cleavage and/or binding activity relative to the activity of the Cas9 polypeptide without the inserted heterologous amino acid or heterologous polypeptide. In some cases, a Cas9 polypeptide of the present disclosure comprises: a) a Cas9 polypeptide; and b) a heterologous amino acid or heterologous polypeptide inserted internally within the Cas9 polypeptide, where the heterologous amino acid or heterologous polypeptide is inserted at a position that is immediately adjacent and N-terminal to an amino acid residue corresponding to amino acid 1289 of the Cas9 protein set forth in SEQ ID NO: 5, where the Cas9 fusion polypeptide retains cleavage and/or binding activity relative to the activity of the Cas9 polypeptide without the inserted heterologous amino acid or heterologous polypeptide.

[0428] In some cases, a Cas9 polypeptide of the present disclosure comprises: a) a Cas9 polypeptide; and b) a heterologous amino acid or heterologous polypeptide inserted internally within the Cas9 polypeptide, where the heterologous amino acid or heterologous polypeptide is inserted at a position that is immediately adjacent and C-terminal to an amino acid residue corresponding to amino acid 1291 of the Cas9 protein set forth in SEQ ID NO: 5, where the Cas9 fusion polypeptide retains cleavage and/or binding activity relative to the activity of the Cas9 polypeptide without the inserted heterologous amino acid or heterologous polypeptide. In some cases, a Cas9 polypeptide of the present disclosure comprises: a) a Cas9 polypeptide; and b) a heterologous amino acid or heterologous polypeptide inserted internally within the Cas9 polypeptide, where the heterologous amino acid or heterologous polypeptide is inserted at a position that is immediately adjacent and N-terminal to an amino acid residue corresponding to amino acid 1291 of the Cas9 protein set forth in SEQ ID NO: 5, where the Cas9 fusion polypeptide retains cleavage and/or binding activity relative to the activity of the Cas9 polypeptide without the inserted heterologous amino acid or heterologous polypeptide.

[0429] In some cases, a Cas9 polypeptide of the present disclosure comprises: a) a Cas9 polypeptide; and b) a heterologous amino acid or heterologous polypeptide inserted internally within the Cas9 polypeptide, where the heterologous amino acid or heterologous polypeptide is inserted at a position that is immediately adjacent and C-terminal to an amino acid residue corresponding to amino acid 1292 of the Cas9 protein set forth in SEQ ID NO: 5, where the Cas9 fusion polypeptide retains cleavage and/or binding activity relative to the activity of the Cas9 polypeptide without the inserted heterologous amino acid or heterologous polypeptide. In some cases, a Cas9 polypeptide of the present disclosure comprises: a) a Cas9 polypeptide; and b) a heterologous amino acid or heterologous polypeptide inserted internally within the Cas9 polypeptide, where the heterologous amino acid or heterologous polypeptide is inserted at a position that is immediately adjacent and N-terminal to an amino acid residue corresponding to amino acid 1292 of the Cas9 protein set forth in SEQ ID NO: 5, where the Cas9 fusion polypeptide retains cleavage and/or binding activity relative to the activity of the Cas9 polypeptide without the inserted heterologous amino acid or heterologous polypeptide.

[0430] In some cases, a Cas9 polypeptide of the present disclosure comprises: a) a Cas9 polypeptide; and b) a heterologous amino acid or heterologous polypeptide inserted internally within the Cas9 polypeptide, where the heterologous amino acid or heterologous polypeptide is inserted at a position that is immediately adjacent and C-terminal to an amino acid residue corresponding to amino acid 1293 of the Cas9 protein set forth in SEQ ID NO: 5, where the Cas9 fusion polypeptide retains cleavage and/or binding activity relative to the activity of the Cas9 polypeptide without the inserted heterologous amino acid or heterologous polypeptide. In some cases, a Cas9 polypeptide of the present disclosure comprises: a) a Cas9 polypeptide; and b) a heterologous amino acid or heterologous polypeptide inserted internally within the Cas9 polypeptide, where the heterologous amino acid or heterologous polypeptide is inserted at a position that is immediately adjacent and N-terminal to an amino acid residue corresponding to amino acid 1293 of the Cas9 protein set forth in SEQ ID NO: 5, where the Cas9 fusion polypeptide retains cleavage and/or binding activity relative to the activity of the Cas9 polypeptide without the inserted heterologous amino acid or heterologous polypeptide.

[0431] In some cases, a Cas9 polypeptide of the present disclosure comprises: a) a Cas9 polypeptide; and b) a heterologous amino acid or heterologous polypeptide inserted internally within the Cas9 polypeptide, where the heterologous amino acid or heterologous polypeptide is inserted at a position that is immediately adjacent and C-terminal to an amino acid residue corresponding to amino acid 1294 of the Cas9 protein set forth in SEQ ID NO: 5, where the Cas9 fusion polypeptide retains cleavage and/or binding activity relative to the activity of the Cas9 polypeptide without the inserted heterologous amino acid or heterologous polypeptide. In some cases, a Cas9 polypeptide of the present disclosure comprises: a) a Cas9 polypeptide; and b) a heterologous amino acid or heterologous polypeptide inserted internally within the Cas9 polypeptide, where the heterologous amino acid or heterologous polypeptide is inserted at a position that is immediately adjacent and N-terminal to an amino acid residue corresponding to amino acid 1294 of the Cas9 protein set forth in SEQ ID NO: 5, where the Cas9 fusion polypeptide retains cleavage and/or binding activity relative to the activity of the Cas9 polypeptide without the inserted heterologous amino acid or heterologous polypeptide.

[0432] In some cases, a Cas9 polypeptide of the present disclosure comprises: a) a Cas9 polypeptide; and b) a heterologous amino acid or heterologous polypeptide inserted internally within the Cas9 polypeptide, where the heterologous amino acid or heterologous polypeptide is inserted at a position that is immediately adjacent and C-terminal to an amino acid residue corresponding to amino acid 1295 of the Cas9 protein set forth in SEQ ID NO: 5, where the Cas9 fusion polypeptide retains cleavage and/or binding activity relative to the activity of the Cas9 polypeptide without the inserted heterologous amino acid or heterologous polypeptide. In some cases, a Cas9 polypeptide of the present disclosure comprises: a) a Cas9 polypeptide; and b) a heterologous amino acid or heterologous polypeptide inserted internally within the Cas9 polypeptide, where the heterologous amino acid or heterologous polypeptide is inserted at a position that is immediately adjacent and N-terminal to an amino acid residue corresponding to amino acid 1295 of the Cas9 protein set forth in SEQ ID NO: 5, where the Cas9 fusion polypeptide retains cleavage and/or binding activity relative to the activity of the Cas9 polypeptide without the inserted heterologous amino acid or heterologous polypeptide.

[0433] In some cases, a Cas9 polypeptide of the present disclosure comprises: a) a Cas9 polypeptide; and b) a heterologous amino acid or heterologous polypeptide inserted internally within the Cas9 polypeptide, where the heterologous amino acid or heterologous polypeptide is inserted at a position that is immediately adjacent and C-terminal to an amino acid residue corresponding to amino acid 1296 of the Cas9 protein set forth in SEQ ID NO: 5, where the Cas9 fusion polypeptide retains cleavage and/or binding activity relative to the activity of the Cas9 polypeptide without the inserted heterologous amino acid or heterologous polypeptide. In some cases, a Cas9 polypeptide of the present disclosure comprises: a) a Cas9 polypeptide; and b) a heterologous amino acid or heterologous polypeptide inserted internally within the Cas9 polypeptide, where the heterologous amino acid or heterologous polypeptide is inserted at a position that is immediately adjacent and N-terminal to an amino acid residue corresponding to amino acid 1296 of the Cas9 protein set forth in SEQ ID NO: 5, where the Cas9 fusion polypeptide retains cleavage and/or binding activity relative to the activity of the Cas9 polypeptide without the inserted heterologous amino acid or heterologous polypeptide.

[0434] In some cases, a Cas9 polypeptide of the present disclosure comprises: a) a Cas9 polypeptide; and b) a heterologous amino acid or heterologous polypeptide inserted internally within the Cas9 polypeptide, where the heterologous amino acid or heterologous polypeptide is inserted at a position that is immediately adjacent and C-terminal to an amino acid residue corresponding to amino acid 1298 of the Cas9 protein set forth in SEQ ID NO: 5, where the Cas9 fusion polypeptide retains cleavage and/or binding activity relative to the activity of the Cas9 polypeptide without the inserted heterologous amino acid or heterologous polypeptide.

[0435] In some cases, a Cas9 polypeptide of the present disclosure comprises: a) a Cas9 polypeptide; and b) a heterologous amino acid or heterologous polypeptide inserted internally within the Cas9 polypeptide, where the heterologous amino acid or heterologous polypeptide is inserted at a position that is immediately adjacent and C-terminal to an amino acid residue corresponding to amino acid 1299 of the Cas9 protein set forth in SEQ ID NO: 5, where the Cas9 fusion polypeptide retains cleavage and/or binding activity relative to the activity of the Cas9 polypeptide without the inserted heterologous amino acid or heterologous polypeptide. In some cases, a Cas9 polypeptide of the present disclosure comprises: a) a Cas9 polypeptide; and b) a heterologous amino acid or heterologous polypeptide inserted internally within the Cas9 polypeptide, where the heterologous amino acid or heterologous polypeptide is inserted at a position that is immediately adjacent and N-terminal to an amino acid residue corresponding to amino acid 1299 of the Cas9 protein set forth in SEQ ID NO: 5, where the Cas9 fusion polypeptide retains cleavage and/or binding activity relative to the activity of the Cas9 polypeptide without the inserted heterologous amino acid or heterologous polypeptide.

[0436] In some cases, a Cas9 polypeptide of the present disclosure comprises: a) a Cas9 polypeptide; and b) a heterologous amino acid or heterologous polypeptide inserted internally within the Cas9 polypeptide, where the heterologous amino acid or heterologous polypeptide is inserted at a position that is immediately adjacent and C-terminal to an amino acid residue corresponding to amino acid 1300 of the Cas9 protein set forth in SEQ ID NO: 5, where the Cas9 fusion polypeptide retains cleavage and/or binding activity relative to the activity of the Cas9 polypeptide without the inserted heterologous amino acid or heterologous polypeptide. In some cases, a Cas9 polypeptide of the present disclosure comprises: a) a Cas9 polypeptide; and b) a heterologous amino acid or heterologous polypeptide inserted internally within the Cas9 polypeptide, where the heterologous amino acid or heterologous polypeptide is inserted at a position that is immediately adjacent and N-terminal to an amino acid residue corresponding to amino acid 1300 of the Cas9 protein set forth in SEQ ID NO: 5, where the Cas9 fusion polypeptide retains cleavage and/or binding activity relative to the activity of the Cas9 polypeptide without the inserted heterologous amino acid or heterologous polypeptide.

[0437] In some cases, a Cas9 polypeptide of the present disclosure comprises: a) a Cas9 polypeptide; and b) a heterologous amino acid or heterologous polypeptide inserted internally within the Cas9 polypeptide, where the heterologous amino acid or heterologous polypeptide is inserted at a position that is immediately adjacent and C-terminal to an amino acid residue corresponding to amino acid 1302 of the Cas9 protein set forth in SEQ ID NO: 5, where the Cas9 fusion polypeptide retains cleavage and/or binding activity relative to the activity of the Cas9 polypeptide without the inserted heterologous amino acid or heterologous polypeptide. In some cases, a Cas9 polypeptide of the present disclosure comprises: a) a Cas9 polypeptide; and b) a heterologous amino acid or heterologous polypeptide inserted internally within the Cas9 polypeptide, where the heterologous amino acid or heterologous polypeptide is inserted at a position that is immediately adjacent and N-terminal to an amino acid residue corresponding to amino acid 1302 of the Cas9 protein set forth in SEQ ID NO: 5, where the Cas9 fusion polypeptide retains cleavage and/or binding activity relative to the activity of the Cas9 polypeptide without the inserted heterologous amino acid or heterologous polypeptide.

[0438] In some cases, a Cas9 polypeptide of the present disclosure comprises: a) a Cas9 polypeptide; and b) a heterologous amino acid or heterologous polypeptide inserted internally within the Cas9 polypeptide, where the heterologous amino acid or heterologous polypeptide is inserted at a position that is immediately adjacent and C-terminal to an amino acid residue corresponding to amino acid 1304 of the Cas9 protein set forth in SEQ ID NO: 5, where the Cas9 fusion polypeptide retains cleavage and/or binding activity relative to the activity of the Cas9 polypeptide without the inserted heterologous amino acid or heterologous polypeptide. In some cases, a Cas9 polypeptide of the present disclosure comprises: a) a Cas9 polypeptide; and b) a heterologous amino acid or heterologous polypeptide inserted internally within the Cas9 polypeptide, where the heterologous amino acid or heterologous polypeptide is inserted at a position that is immediately adjacent and N-terminal to an amino acid residue corresponding to amino acid 1304 of the Cas9 protein set forth in SEQ ID NO: 5, where the Cas9 fusion polypeptide retains cleavage and/or binding activity relative to the activity of the Cas9 polypeptide without the inserted heterologous amino acid or heterologous polypeptide.

[0439] In some cases, a Cas9 polypeptide of the present disclosure comprises: a) a Cas9 polypeptide; and b) a heterologous amino acid or heterologous polypeptide inserted internally within the Cas9 polypeptide, where the heterologous amino acid or heterologous polypeptide is inserted at a position that is immediately adjacent and C-terminal to an amino acid residue corresponding to amino acid 1306 of the Cas9 protein set forth in SEQ ID NO: 5, where the Cas9 fusion polypeptide retains cleavage and/or binding activity relative to the activity of the Cas9 polypeptide without the inserted heterologous amino acid or heterologous polypeptide. In some cases, a Cas9 polypeptide of the present disclosure comprises: a) a Cas9 polypeptide; and b) a heterologous amino acid or heterologous polypeptide inserted internally within the Cas9 polypeptide, where the heterologous amino acid or heterologous polypeptide is inserted at a position that is immediately adjacent and N-terminal to an amino acid residue corresponding to amino acid 1306 of the Cas9 protein set forth in SEQ ID NO: 5, where the Cas9 fusion polypeptide retains cleavage and/or binding activity relative to the activity of the Cas9 polypeptide without the inserted heterologous amino acid or heterologous polypeptide.

[0440] In some cases, a Cas9 polypeptide of the present disclosure comprises: a) a Cas9 polypeptide; and b) a heterologous amino acid or heterologous polypeptide inserted internally within the Cas9 polypeptide, where the heterologous amino acid or heterologous polypeptide is inserted at a position that is immediately adjacent and C-terminal to an amino acid residue corresponding to amino acid 1307 of the Cas9 protein set forth in SEQ ID NO: 5, where the Cas9 fusion polypeptide retains cleavage and/or binding activity relative to the activity of the Cas9 polypeptide without the inserted heterologous amino acid or heterologous polypeptide. In some cases, a Cas9 polypeptide of the present disclosure comprises: a) a Cas9 polypeptide; and b) a heterologous amino acid or heterologous polypeptide inserted internally within the Cas9 polypeptide, where the heterologous amino acid or heterologous polypeptide is inserted at a position that is immediately adjacent and N-terminal to an amino acid residue corresponding to amino acid 1307 of the Cas9 protein set forth in SEQ ID NO: 5, where the Cas9 fusion polypeptide retains cleavage and/or binding activity relative to the activity of the Cas9 polypeptide without the inserted heterologous amino acid or heterologous polypeptide.

[0441] In some cases, a Cas9 polypeptide of the present disclosure comprises: a) a Cas9 polypeptide; and b) a heterologous amino acid or heterologous polypeptide inserted internally within the Cas9 polypeptide, where the heterologous amino acid or heterologous polypeptide is inserted at a position that is immediately adjacent and C-terminal to an amino acid residue corresponding to amino acid 1344 of the Cas9 protein set forth in SEQ ID NO: 5, where the Cas9 fusion polypeptide retains cleavage and/or binding activity relative to the activity of the Cas9 polypeptide without the inserted heterologous amino acid or heterologous polypeptide. In some cases, a Cas9 polypeptide of the present disclosure comprises: a) a Cas9 polypeptide; and b) a heterologous amino acid or heterologous polypeptide inserted internally within the Cas9 polypeptide, where the heterologous amino acid or heterologous polypeptide is inserted at a position that is immediately adjacent and N-terminal to an amino acid residue corresponding to amino acid 1344 of the Cas9 protein set forth in SEQ ID NO: 5, where the Cas9 fusion polypeptide retains cleavage and/or binding activity relative to the activity of the Cas9 polypeptide without the inserted heterologous amino acid or heterologous polypeptide.

[0442] In some cases, a Cas9 polypeptide of the present disclosure comprises: a) a Cas9 polypeptide; and b) a heterologous amino acid or heterologous polypeptide inserted internally within the Cas9 polypeptide, where the heterologous amino acid or heterologous polypeptide is inserted at a position that is immediately adjacent and C-terminal to an amino acid residue corresponding to amino acid 1346 of the Cas9 protein set forth in SEQ ID NO: 5, where the Cas9 fusion polypeptide retains cleavage and/or binding activity relative to the activity of the Cas9 polypeptide without the inserted heterologous amino acid or heterologous polypeptide. In some cases, a Cas9 polypeptide of the present disclosure comprises: a) a Cas9 polypeptide; and b) a heterologous amino acid or heterologous polypeptide inserted internally within the Cas9 polypeptide, where the heterologous amino acid or heterologous polypeptide is inserted at a position that is immediately adjacent and N-terminal to an amino acid residue corresponding to amino acid 1346 of the Cas9 protein set forth in SEQ ID NO: 5, where the Cas9 fusion polypeptide retains cleavage and/or binding activity relative to the activity of the Cas9 polypeptide without the inserted heterologous amino acid or heterologous polypeptide.

[0443] In some cases, a Cas9 polypeptide of the present disclosure comprises: a) a Cas9 polypeptide; and b) a heterologous amino acid or heterologous polypeptide inserted internally within the Cas9 polypeptide, where the heterologous amino acid or heterologous polypeptide is inserted at a position that is immediately adjacent and C-terminal to an amino acid residue corresponding to amino acid 1347 of the Cas9 protein set forth in SEQ ID NO: 5, where the Cas9 fusion polypeptide retains cleavage and/or binding activity relative to the activity of the Cas9 polypeptide without the inserted heterologous amino acid or heterologous polypeptide. In some cases, a Cas9 polypeptide of the present disclosure comprises: a) a Cas9 polypeptide; and b) a heterologous amino acid or heterologous polypeptide inserted internally within the Cas9 polypeptide, where the heterologous amino acid or heterologous polypeptide is inserted at a position that is immediately adjacent and N-terminal to an amino acid residue corresponding to amino acid 1347 of the Cas9 protein set forth in SEQ ID NO: 5, where the Cas9 fusion polypeptide retains cleavage and/or binding activity relative to the activity of the Cas9 polypeptide without the inserted heterologous amino acid or heterologous polypeptide.

[0444] In some cases, a Cas9 polypeptide of the present disclosure comprises: a) a Cas9 polypeptide; and b) a heterologous amino acid or heterologous polypeptide inserted internally within the Cas9 polypeptide, where the heterologous amino acid or heterologous polypeptide is inserted at a position that is immediately adjacent and C-terminal to an amino acid residue corresponding to amino acid 1348 of the Cas9 protein set forth in SEQ ID NO: 5, where the Cas9 fusion polypeptide retains cleavage and/or binding activity relative to the activity of the Cas9 polypeptide without the inserted heterologous amino acid or heterologous polypeptide. In some cases, a Cas9 polypeptide of the present disclosure comprises: a) a Cas9 polypeptide; and b) a heterologous amino acid or heterologous polypeptide inserted internally within the Cas9 polypeptide, where the heterologous amino acid or heterologous polypeptide is inserted at a position that is immediately adjacent and N-terminal to an amino acid residue corresponding to amino acid 1348 of the Cas9 protein set forth in SEQ ID NO: 5, where the Cas9 fusion polypeptide retains cleavage and/or binding activity relative to the activity of the Cas9 polypeptide without the inserted heterologous amino acid or heterologous polypeptide.

[0445] In some cases, a Cas9 polypeptide of the present disclosure comprises: a) a Cas9 polypeptide; and b) a heterologous amino acid or heterologous polypeptide inserted internally within the Cas9 polypeptide, where the heterologous amino acid or heterologous polypeptide is inserted at a position that is immediately adjacent and C-terminal to an amino acid residue corresponding to amino acid 1360 of the Cas9 protein set forth in SEQ ID NO: 5, where the Cas9 fusion polypeptide retains cleavage and/or binding activity relative to the activity of the Cas9 polypeptide without the inserted heterologous amino acid or heterologous polypeptide. In some cases, a Cas9 polypeptide of the present disclosure comprises: a) a Cas9 polypeptide; and b) a heterologous amino acid or heterologous polypeptide inserted internally within the Cas9 polypeptide, where the heterologous amino acid or heterologous polypeptide is inserted at a position that is immediately adjacent and N-terminal to an amino acid residue corresponding to amino acid 1360 of the Cas9 protein set forth in SEQ ID NO: 5, where the Cas9 fusion polypeptide retains cleavage and/or binding activity relative to the activity of the Cas9 polypeptide without the inserted heterologous amino acid or heterologous polypeptide.

[0446] In some cases, a Cas9 polypeptide of the present disclosure comprises: a) a Cas9 polypeptide; and b) a heterologous amino acid or heterologous polypeptide inserted internally within the Cas9 polypeptide, where the heterologous amino acid or heterologous polypeptide is inserted at a position that is immediately adjacent and C-terminal to an amino acid residue corresponding to amino acid 1363 of the Cas9 protein set forth in SEQ ID NO: 5, where the Cas9 fusion polypeptide retains cleavage and/or binding activity relative to the activity of the Cas9 polypeptide without the inserted heterologous amino acid or heterologous polypeptide. In some cases, a Cas9 polypeptide of the present disclosure comprises: a) a Cas9 polypeptide; and b) a heterologous amino acid or heterologous polypeptide inserted internally within the Cas9 polypeptide, where the heterologous amino acid or heterologous polypeptide is inserted at a position that is immediately adjacent and N-terminal to an amino acid residue corresponding to amino acid 1363 of the Cas9 protein set forth in SEQ ID NO: 5, where the Cas9 fusion polypeptide retains cleavage and/or binding activity relative to the activity of the Cas9 polypeptide without the inserted heterologous amino acid or heterologous polypeptide.

[0447] In some cases, a Cas9 polypeptide of the present disclosure comprises: a) a Cas9 polypeptide; and b) a heterologous amino acid or heterologous polypeptide inserted internally within the Cas9 polypeptide, where the heterologous amino acid or heterologous polypeptide is inserted at a position that is immediately adjacent and C-terminal to an amino acid residue corresponding to amino acid 1366 of the Cas9 protein set forth in SEQ ID NO: 5, where the Cas9 fusion polypeptide retains cleavage and/or binding activity relative to the activity of the Cas9 polypeptide without the inserted heterologous amino acid or heterologous polypeptide. In some cases, a Cas9 polypeptide of the present disclosure comprises: a) a Cas9 polypeptide; and b) a heterologous amino acid or heterologous polypeptide inserted internally within the Cas9 polypeptide, where the heterologous amino acid or heterologous polypeptide is inserted at a position that is immediately adjacent and N-terminal to an amino acid residue corresponding to amino acid 1366 of the Cas9 protein set forth in SEQ ID NO: 5, where the Cas9 fusion polypeptide retains cleavage and/or binding activity relative to the activity of the Cas9 polypeptide without the inserted heterologous amino acid or heterologous polypeptide.

[0448] In some cases, a Cas9 polypeptide of the present disclosure comprises: a) a Cas9 polypeptide; and b) a heterologous amino acid or heterologous polypeptide inserted internally within the Cas9 polypeptide, where the heterologous amino acid or heterologous polypeptide is inserted at a position that is immediately adjacent and C-terminal to an amino acid residue corresponding to amino acid 1367 of the Cas9 protein set forth in SEQ ID NO: 5, where the Cas9 fusion polypeptide retains cleavage and/or binding activity relative to the activity of the Cas9 polypeptide without the inserted heterologous amino acid or heterologous polypeptide. In some cases, a Cas9 polypeptide of the present disclosure comprises: a) a Cas9 polypeptide; and b) a heterologous amino acid or heterologous polypeptide inserted internally within the Cas9 polypeptide, where the heterologous amino acid or heterologous polypeptide is inserted at a position that is immediately adjacent and N-terminal to an amino acid residue corresponding to amino acid 1367 of the Cas9 protein set forth in SEQ ID NO: 5, where the Cas9 fusion polypeptide retains cleavage and/or binding activity relative to the activity of the Cas9 polypeptide without the inserted heterologous amino acid or heterologous polypeptide.

[0449] As noted at the bottom of FIG. 20C (and as depicted in FIG. 22B as an illustrative example) in some cases, the last amino acid of the Cas9 sequence flanking the heterologous peptide at the N-terminus (at the junction of the N-terminal end of the heterologous polypeptide with the Cas9 polypeptide) is mutated. As an illustrative example, in the case depicted in FIG. 22B, there is a Q to H amino acid substitution at position 1027. In this case, the insert site is referred to as 1027 despite the presence of the mutation. Also as noted in FIG. 22B, these cases can be recognized when the amino acid of the Cas9 polypeptide that is N-terminal to the insertion site was mutated from an L, M, Q, K, E, W, or R to an F, I, H, N, D, C, or S, respectively.

### Heterologous Polypeptides

[0450] A variety of heterologous polypeptides are suitable for inclusion in a Cas9 fusion polypeptide of the present disclosure. In some embodiments, the heterologous polypeptide can be fused to one or more internal portions (i.e., a portion other than the N- or C-terminus) of the Cas9 fusion polypeptide, as described herein. In some embodiments, the heterologous polypeptide is fused to the C-terminus of the Cas9 fusion polypeptide. In some embodiments, the heterologous polypeptide is fused to the N-terminus of the Cas9 fusion polypeptide. In some cases, a Cas9 fusion polypeptide of the present disclosure does not include a heterologous polypeptide fused to the N-terminus of the Cas9 polypeptide. In some cases, a Cas9 fusion polypeptide of the present disclosure does not include a heterologous polypeptide fused to the C-terminus of the Cas9 polypeptide. In some cases, a Cas9 fusion polypeptide of the present disclosure does not include a heterologous polypeptide fused to the C-terminus of the Cas9 polypeptide and does not include a heterologous polypeptide fused to the N-terminus of the Cas9 polypeptide.

[0451] The Cas9 fusion polypeptide can contain any convenient number of heterologous polypeptides at one or more insertion sites. Thus, the Cas9 fusion polypeptide can contain one or more, e.g., 2 or more, 3 or more, 4 or more, 5 or more, 7 or more, including 10 or more heterologous polypeptides, and can contain 15 or fewer, e.g., 12 or fewer, 10 or fewer, 8 or fewer, 6 or fewer, 4 or fewer, 3 or fewer, including 2 or fewer distinct heterologous polypeptides. In some cases, the Cas9 fusion polypeptide contains between 1 to 10, e.g., between 1 to 8, between 1 to 5, between 1 to 4, between 1 to 3, including between 1 to 2 heterologous polypeptides. Where the Cas9 fusion polypeptide contains more than one heterologous polypeptide, any two of the heterologous polypeptides may be the same or may be distinct heterologous polypeptides. In some cases, a Cas9 fusion polypeptide of the present disclosure comprises a single heterologous polypeptide inserted at a site internal to the Cas9 polypeptide. In some cases, a Cas9 fusion polypeptide of the present disclosure comprises 2 heterologous polypeptides inserted at two different sites internal to the Cas9 polypeptide.

[0452] A heterologous polypeptide suitable for inclusion in a Cas9 fusion polypeptide of the present disclosure can be any suitable length. In some cases, the length of the heterologous polypeptide is 1 amino acid or more, e.g., 5 amino acids or more, 10 amino acids or more, 15 amino acids or more, 20 amino acids or more, 25 amino acids or more, 30 amino acids or more, 40 amino acids or more, 50 amino acids or more, 75 amino acids or more, 100 amino acids or more, 150 amino acids or more, 200 amino acids or more, 300 amino acids or more, 400 amino acids or more, including 500 amino acids or more, and is 1000 amino acids or less, e.g., 750 amino acids or less, 600 amino acids or less, 500 amino acids or less, 400 amino acids or less, 350 amino acids or less, 300 amino acids or less, 250 amino acids or less, 200 amino acids or less, 150 amino acids or less, 125 amino acids or less, 100 amino acids or less, 75 amino acids or less, 50 amino acids or less, 40 amino acids or less, 35 amino acids or less, 30 amino acids or less, including 20 amino acids or less. A heterologous polypeptide suitable for inclusion in a Cas9 fusion polypeptide of the present disclosure can have a length in the range of about 1 to about 1000 amino acids, e.g. 1 to about 600 amino acids, 5 to about 500 amino acids, about 10 to about 400 amino acids, about 20 to about 300 amino acids, including about 50 to about 250 amino acids. A heterologous polypeptide suitable for inclusion in a Cas9 fusion polypeptide of the present disclosure can have a length in the range of from 5 amino acids to 20 amino acids, from 20 amino acids to 25 amino acids, from 25 amino acids to 50 amino acids, from 50 amino acids to 100 amino acids, from 100 amino acids to 150 amino acids, from 150 amino acids to 200 amino acids, or from 200 amino acids to 250 amino acids.

[0453] Suitable heterologous polypeptides for inclusion in a Cas9 fusion polypeptide of the present disclosure include, but are not limited to: 1) a member of a specific binding pair; 2) a polypeptide that confers an inducible conformational change on the Cas9 fusion polypeptide (e.g., a ligand binding domain of an estrogen receptor, an EF domain from calmodulin which specifically binds Ca²⁺, and the like); 3) a targeting polypeptide that provides for binding to a cell surface moiety on a target cell or target cell type; 4) a polypeptide that provides an attachment site for a small molecule agent (e.g., a therapeutic agent); 5) a polypeptide (e.g., domain) that modifies DNA and/or or RNA (e.g., appends moieties such as methyl groups), 6) a polypeptide (e.g., domain) that can bind DNA and/or or RNA specifically, 7) a polypeptide (e.g., domain) that binds DNA and/or or RNA non-specifically, 8) a polypeptide (e.g., domain) that modifies proteins associated with DNA (e.g., methylates or acetylates a protein such as a histone), 9) a polypeptide (e.g., domain) that degrades DNA and/or RNA, 10) a polypeptide (e.g., domain) that polymerizes DNA and/or RNA, 11) a polypeptide (e.g., domain) that modulates transcription (e.g., represses transcription or activates transcription, 12) a polypeptide (e.g., domain) that covalently attaches to other polypeptide domains (e.g., spyCatcher), 13) any of the aforementioned polypeptides (e.g., domains) which have been engineered themselves e.g. a PDZ domain engineered for alternate specificity.

[0454] For example, in some cases, a Cas9 fusion polypeptide of the present disclosure is capable of sensing the physiological state of the cell and acting in a conditional fashion. For example, this sensing could be related to metabolism or the disorder of metabolism. There are a number of known periplasmic binding proteins and homologous bacterial transcriptions factors that have been validated to bind critical cellular metabolites including, but not limited, to those in glycolysis, the pentose phosphate pathway, the tricarboxylic acid (TCA) cycle, amino acid metabolism, nucleotide metabolism, and Warburg metabolism. As an example, higher levels of lactate can be correlated with altered metabolism and the progression towards cancer. For example, the heterologous polypeptide can be a lactate-binding protein (or fragment thereof), such as LldR, from E. coli; where the Cas9 fusion polypeptide comprising such a heterologous polypeptide has lactate-sensing ability. Following increased (or decreased) levels of lactate, the Cas9 fusion polypeptide could be used to initiate a gene editing or reprogramming.

[0455] In a similar fashion, in some cases, a Cas9 fusion polypeptide of the present disclosure exhibits the ability to sense a specific ion related to a change in cellular physiology; such ions include, but are not limited to, Ca²⁺, Zn²⁺, Cu²⁺, Na⁺, and Cl. There are numerous known protein domains that specifically bind these ions.

### Specific Binding Pairs

[0456] In some cases, the heterologous polypeptide present in a Cas9 fusion polypeptide of the present disclosure is a member of a specific binding pair. Thus, for example, in some cases, a variant Cas9 polypeptide of the present disclosure comprises a heterologous polypeptide that binds a second polypeptide that is a specific binding partner of the heterologous polypeptide; in other words, in some cases, a variant Cas9 polypeptide of the present disclosure comprises a heterologous polypeptide that is a first member of a specific binding pair, where the variant Cas9 polypeptide binds a second polypeptide comprising a second member of the specific binding pair. The heterologous polypeptide may contain any member of a specific binding pair suitable for inserting into a Cas9 polypeptide. In certain embodiments, the specific binding pair undergoes binding through protein-protein interaction domains, such as, but not limited to, coiled-coil, zinc finger, RING finger, WD40 repeat, armadillo repeat, ankyrin repeat, src homology 2 (SH2-), SH3-, phosphotyrosine-bindin (PTB-), PDZ-, WW-, epidermal growth factor receptor substrate (EPS) 15 homology (EH-), LIM-, tetratrico peptide repeat region (TPR-), sterile alpha motif (SAM-), Ena/Vasp homology (EVH1-), or any other modular protein-protein interaction domains. Thus, in some cases, the heterologous polypeptide includes a coiled-coil, zinc finger, RING finger, WD40 repeat, armadillo repeat, ankyrin repeat, SH2-, SH3-, PTB-, PDZ-, WW-, EH-, LIM-, TPR-, SAM-, EVH1- or any other member of a modular protein-protein interaction domains. In some embodiments, the heterologous polypeptide includes a suitable binding partner for the coiled-coil, zinc finger, RING finger, WD40 repeat, armadillo repeat, ankyrin repeat, SH2-, SH3-, PTB-, PDZ-, WW-, EH-, LIM-, TPR-, SAM-, EVH1-, or any other member of the modular protein-protein interaction domains. The modular protein-protein interaction domain may be a suitable domain, or a derivative thereof, found in any suitable protein. Examples of proteins that contain modular protein-protein interaction domains are found in, e.g., PCT publication No. WO 2003056329, which is incorporated herein by reference.

[0457] In some cases, the heterologous polypeptide contains a PDZ domain. The heterologous polypeptide may contain a PDZ domain found in any suitable protein. In some cases, the heterologous polypeptide contains the alpha-1-syntrophin PDZ domain. In some cases, the heterologous polypeptide contains an amino acid sequence at least 90%, e.g., at least 95%, at least 98%, at least 99%, or 100% identical to the sequence set forth in SEQ ID NO:1079 (FIG. 21A). The specific binding partner for alpha-1-syntrophin PDZ domain is the peptide sequence GVKESLV (SEQ ID NO: 1084) at the C-terminus of a second protein. Thus a subject Cas9 fusion polypeptide that includes a heterologous polypeptide having an alpha-1-syntrophin PDZ domain, as described herein, can specifically bind a second polypeptide that includes the PDZ ligand amino acid sequence GVKESLV (SEQ ID NO: 1084) at the C-terminus via the interaction between the PDZ domain and the PDZ ligand amino acid sequence. Other PDZ domains suitable for including in the subject heterologous polypeptide is found in PDZ domain-containing proteins such as CASK, hDlg1, SHANK1, SHANK3, EBP-50, KIAA0807, TIP1, PSD-95, Pick1, CNK, GRIP, DVL-2, ZO-1, InaD, Par-6, Dvl, Tamalin, NHERF, nNOS, X11alpha, HtrA, etc. Examples of PDZ domain-containing proteins are found in, e.g., PCT publication Nos. WO 2003056329 and WO 2003004604, which are incorporated herein by reference.

[0458] In some cases, the heterologous polypeptide includes a PDZ domain ligand, which can bind to a PDZ domain, as described above. Any suitable PDZ domain ligand may be included in the heterologous polypeptide. PDZ domain ligands suitable for including in the subject heterologous polypeptide is found in PDZ domain ligand-containing proteins such as PAG, LPAP, ITK, DNAM-1, Shroom, PTEN, BLR-1, fyn, Vac14, Frizzled, Idax, Pals1, etc.

[0459] In certain embodiments, the heterologous polypeptide includes a coiled-coil domain. Examples of a suitable coiled-coil domains include, but are not limited to:

SYNZIP14:
(SEQ ID NO: 1085)
NDLDAYEREAEKLEKKNEVLRNRLAALENELATLRQEVASMKQELQS;
SYNZIP17:
(SEQ ID NO: 1086)
NEKEELKSKKAELRNRIEQLKQKREQLKQKIANLRKEIEAYK;
and
SYNZIP18:
(SEQ ID NO: 1087)
SIAATLENDLARLENENARLEKDIANLERDLAKLEREEAYFs.

[0460] In some cases, the modular protein-protein interaction domain is a ligand-gated or inducible interaction domain. The heterologous polypeptide can include any suitable ligand-gated interaction domain or protein, such as, but not limited to, FK506 binding protein (FKBP); the FKBP12-rapamycin binding (FRB) domain (e.g., of mammalian target of rapamycin (mTOR); protein phosphatase 3, catalytic subunit, alpha isozyme (PPP3CA); the dimerization domain of gyrase B (GyrB); gibberellin insensitive dwarf1 (GID1); gibberellin insensitive (GAI); pyrabactin resistance (PYR) 1-like (PYL); abscisic acid (ABA) insensitive (BAI); dihydrofolate reductase (DHFR); DmrB; cryptochrome 2 (Cry2); CIB1, etc.

[0461] In some cases, a heterologous polypeptide inserted in a subject Cas9 fusion polypeptide is derived from FKBP1A (also known as FKBP12, FKBP1; PKC12; PKCI2; PPIASE; FKBP-12; FKBP-1A). For example, a suitable heterologous polypeptide can include a rapamycin binding portion of FKBP1A. For example, a suitable heterologous polypeptide can comprise an amino acid sequence having 75% or more amino acid sequence identity (e.g., 80% or more, 85% or more, 90% or more, 95% or more, 98% or more, or 100% amino acid sequence identity) to the following amino acid sequence (a rapamycin binding portion of FKBP1A):

(SEQ ID NO: 1088)
GVQVETISPGDGRTFPKRGQTCVVHYTGMLEDGKKFDSSRDRNKPFKFML
GKQEVIRGWEEGVAQMSVGQRAKLTISPDYAYGATGHPGIIPPHATLVFD
VELLKLE.

[0462] In some cases, a heterologous polypeptide inserted in a Cas9 fusion polypeptide is derived from protein phosphatase 3, catalytic subunit, alpha isozyme (PPP3CA) (also known as “Serine/threonine-protein phosphatase 2B catalytic subunit alpha isoform”; CNA; CALN; CALNA; CALNA1; CCN1; CNA1; PPP2B; “CAM-PRP catalytic subunit”; and “calmodulin-dependent calcineurin A subunit alpha isoform”). For example, a suitable heterologous polypeptide can include a binding portion of PPP3CA. For example, a suitable heterologous polypeptide can comprise an amino acid sequence having 75% or more amino acid sequence identity (e.g., 80% or more, 85% or more, 90% or more, 95% or more, 98% or more, or 100% amino acid sequence identity) to the following amino acid sequence (PP2Ac domain):

(SEQ ID NO: 1089)
LEESVALRIITEGASILRQEKNLLDIDAPVTVCGDIHGQFFDLMKLFEVG
GSPANTRYLFLGDYVDRGYFSIECVLYLWALKILYPKTLFLLRGNHECRH
LTEYFTFKQECKIKYSERVYDACMDAFDCLPLAALMNQQFLCVHGGLSPE
INTLDDIRKLDRFKEPPAYGPMCDILWSDPLEDFGNEKTQEHFTHNTVRG
CSYFYSYPAVCEFLQHNNLLSILRAHEAQDAGYRMYRKSQTTGFPSLITI
FSAPNYLDVYNNKAAVLKYENNVMNIRQFNCSPHPYWLPNFM.

[0463] In some cases, a heterologous polypeptide inserted in a Cas9 fusion polypeptide is derived from cyclophilin (also known cyclophilin A, PPIA, CYPA, CYPH, PPIase A, etc.). For example, a suitable heterologous polypeptide can include a binding portion of cyclophilin. For example, a suitable heterologous polypeptide can include an amino acid sequence having 75% or more amino acid sequence identity (e.g., 80% or more, 85% or more, 90% or more, 95% or more, 98% or more, or 100% amino acid sequence identity) to the following amino acid sequence:

(SEQ ID NO: 1090)
MVNPTVFFDIAVDGEPLGRVSFELFADKVPKTAENFRALSTGEKGFGYKG
SCFHRIIPGFMCQGGDFTRHNGTGGKSIYGEKFEDENFILKHTGPGILSM
ANAGPNTNGSQFFICTAKTEWLDGKHVVFGKVKEGMNIVEAMERFGSRNG
KTSKKITIADCGQLE.

[0464] In some cases, a heterologous polypeptide inserted in a Cas9 fusion polypeptide is derived from MTOR (also known as FKBP-rapamycin associated protein; FK506 binding protein 12-rapamycin associated protein 1; FK506 binding protein 12-rapamycin associated protein 2; FK506-binding protein 12-rapamycin complex-associated protein 1; FRAP; FRAP1; FRAP2; RAFT1; and RAPT1). For example, a suitable heterologous polypeptide can include the Fkbp-Rapamycin Binding Domain (also known as FRB). For example, a suitable heterologous polypeptide can include an amino acid sequence having 75% or more amino acid sequence identity (e.g., 80% or more, 85% or more, 90% or more, 95% or more, 98% or more, or 100% amino acid sequence identity) to the following amino acid sequence (FRB):

(SEQ ID NO: 1091)
VAILWHEMWHEGLEEASRLYFGERNVKGMFEVLEPLHAMMERGPQTLKET
SFNQAYGRDLMEAQEWCRKYMKSGNVKDLTQAWDLYYHVFRRIS.

[0465] Rapamycin can serve as a ligand for inducing interaction between protein-protein interaction domains, such as between FKBP1A (e.g., a rapamycin binding portion) and FKBP1A (e.g., a rapamycin binding portion); FKBP1A (e.g., a rapamycin binding portion) and FRB (Fkbp-Rapamycin Binding Domain); FKBP1A (e.g., a rapamycin binding portion) and CnA (calcineurin catalytic subunit A) and FKBP1A (e.g., a rapamycin binding portion) and cyclophilin. Alternatively, a rapamycin derivative or analog can be used. See, e.g., WO96/41865; WO 99/36553; WO 01/14387; and Ye et al (1999) Science 283:88-91. For example, analogs, homologs, derivatives and other compounds related structurally to rapamycin (“rapalogs”) include, among others, variants of rapamycin having one or more of the following modifications relative to rapamycin: demethylation, elimination or replacement of the methoxy at C7, C42 and/or C29; elimination, derivatization or replacement of the hydroxy at C13, C43 and/or C28; reduction, elimination or derivatization of the ketone at C14, C24 and/or C30; replacement of the 6-membered pipecolate ring with a 5-membered prolyl ring; and alternative substitution on the cyclohexyl ring or replacement of the cyclohexyl ring with a substituted cyclopentyl ring. Additional information is presented in, e.g., U.S. Pat. Nos. 5,525,610; 5,310,903 5,362,718; and 5,527,907. Selective epimerization of the C-28 hydroxyl group has been described; see, e.g., WO 01/14387. Additional synthetic ligands suitable for use as an alternative to rapamycin include those described in U.S. Patent Publication No. 2012/0130076.

[0466] Rapamycin has the structure:

[chemical structure]

[0467] Also suitable as a rapalog is a compound of the formula:

[chemical structure]

[0468] where n is 1 or 2; R²⁸ and R⁴³ are independently H, or a substituted or unsubstituted aliphatic or acyl moiety; one of R^{7a} and R^{7b} is H and the other is halo, R^{A}, OR^{A}, SR^{A}, —OC(O)R^{A}, —OC(O)NR^{A}R^{B}, —NR^{A}R^{B}, —NR^{B}C(OR)R^{A}, NR^{B}C(O)OR^{A}, —NR^{B}SO₂R^{A}, or NR^{B}SO₂NR^{A}R^{B′}; or R^{7a} and R^{7b}, taken together, are H in the tetraene moiety:

[chemical structure]

[0469] where R^{A} is H or a substituted or unsubstituted aliphatic, heteroaliphatic, aryl, or heteroaryl moiety and where R^{B} and R^{B′} are independently H, OH, or a substituted or unsubstituted aliphatic, heteroaliphatic, aryl, or heteroaryl moiety.

[0470] In some cases, a heterologous polypeptide present in a Cas9 fusion polypeptide is derived from GyrB (also known as DNA gyrase subunit B). For example, a suitable heterologous polypeptide can include an amino acid sequence having 75% or more amino acid sequence identity (e.g., 80% or more, 85% or more, 90% or more, 95% or more, 98% or more, or 100% amino acid sequence identity) to a contiguous stretch of from about 100 amino acids to about 200 amino acids (aa), from about 200 aa to about 300 aa, from about 300 aa to about 400 aa, from about 400 aa to about 500 aa, from about 500 aa to about 600 aa, from about 600 aa to about 700 aa, or from about 700 aa to about 800 aa, of the following GyrB amino acid sequence from Escherichia coli (or to the DNA gyrase subunit B sequence from any organism): MSNSYDSSSIKVLKGLDAVRKRPGMYIGDTDDGTGLHHMVFEVVDNAIDEALAGHCKE IIVTIHADNSVSVQDDGRGIPTGIHPEEGVSAAEVIMTVLHAGGKFDDNSYKVSGGLHGV GVSVVNALSQKLELVIQREGKIHRQIYEHGVPQAPLAVTGETEKTGTMVRFWPSLETFT NVTEFEYEILAKRLRELSFLNSGVSIRLRDKRDGKEDHFHYEGGIKAFVEYLNKNKTPIH PNIFYFSTEKDGIGVEVALQWNDGFQENIYCFTNNIPQRDGGTHLAGFRAAMTRTLNAY MDKEGYSKKAKVSATGDDAREGLIAVVSVKVPDPKFSSQTKDKLVSSEVKSAVEQQM NELLAEYLLENPTDAKIVVGKIIDAARAREAARRAREMTRRKGALDLAGLPGKLADCQ ERDPALSELYLVEGDSAGGSAKQGRNRKNQAILPLKGKILNVEKARFDKMLSSQEVATL ITALGCGIGRDEYNPDKLRYHSIIIMTDADVDGSHIRTLLLTFFYRQMPEIVERGHVYIAQ PPLYKVKKGKQEQYIKDDEAMDQYQISIALDGATLHTNASAPALAGEALEKLVSEYNA TQKMINRMERRYPKAMLKELIYQPTLTEADLSDEQTVTRWVNALVSELNDKEQHGSQ WKFDVHTNAEQNLFEPIVRVRTHGVDTDYPLDHEFITGGEYRRICTLGEKLRGLLEEDA FIERGERRQPVASFEQALDWLVKESRRGLSIQRYKGLGEMNPEQLWETTMDPESRRML RVTVKDAIAADQLFTTLMGDAVEPRRAFIEENALKAANIDI (SEQ ID NO:1092). In some cases, a heterologous polypeptide includes an amino acid sequence having 75% or more amino acid sequence identity (e.g., 80% or more, 85% or more, 90% or more, 95% or more, 98% or more, or 100% amino acid sequence identity) to amino acids 1-220 of the above-listed GyrB amino acid sequence from Escherichia coli.

[0471] Coumermycin can serve as a ligand for inducing interaction between protein-protein interaction domains, such as between GyrB and GyrB. Alternatively, a coumermycin analog can be used. See, e.g., Farrar et al. (1996) Nature 383:178-181; and U.S. Pat. No. 6,916,846.

[0472] In some cases, a heterologous polypeptide inserted in a Cas9 fusion polypeptide is derived from DHFR (also known as dihydrofolate reductase, DHFRP1, and DYR). For example, a suitable heterologous polypeptide can include an amino acid sequence having 75% or more amino acid sequence identity (e.g., 80% or more, 85% or more, 90% or more, 95% or more, 98% or more, or 100% amino acid sequence identity) to the following amino acid sequence:

(SEQ ID NO: 1093)
MVGSLNCIVAVSQNMGIGKNGDLPWPPLRNEFRYFQRMTTTSSVEGKQNL
VIMGKKTWFSIPEKNRPLKGRINLVLSRELKEPPQGAHFLSRSLDDALKL
TEQPELANKVDMVWIVGGSSVYKEAMNHPGHLKLFVTRIMQDFESDTFFP
EIDLEKYKLLPEYPGVLSDVQEEKGIKYKFEVYEKND.

[0473] In some cases, methotrexate, e.g., a non-cytotoxic, homo-bifunctional methotrexate dimer can serve as a ligand for inducing interaction between protein-protein interaction domains, such as between DHFR and DHFR. See, e.g., U.S. Pat. No. 8,236,925.

[0474] In some cases, a heterologous polypeptide inserted in a Cas9 fusion polypeptide is derived from the DmrB binding domain (i.e., DmrB homodimerization domain). For example, a suitable heterologous polypeptide can include an amino acid sequence having 75% or more amino acid sequence identity (e.g., 80% or more, 85% or more, 90% or more, 95% or more, 98% or more, or 100% amino acid sequence identity) to the following amino acid sequence:

(SEQ ID NO: 1094)
MASRGVQVETISPGDGRTFPKRGQTCVVHYTGMLEDGKKVDSSRDRNKPF
KFMLGKQEVIRGWEEGVAQMSVGQRAKLTISPDYAYGATGHPGIIPPHAT
LVFDVELLKLE.

[0475] In some cases, a heterologous polypeptide inserted in a Cas9 fusion polypeptide is derived from a PYL protein (also known as abscisic acid receptor and as RCAR). For example a subject heterologous polypeptide can be derived from proteins such as those of Arabidopsis thaliana: PYR1, RCAR1(PYL9), PYL1, PYL2, PYL3, PYL4, PYL5, PYL6, PYL7, PYL8 (RCAR3), PYL10, PYL11, PYL12, PYL13. For example, a suitable heterologous polypeptide can include an amino acid sequence having 75% or more amino acid sequence identity (e.g., 80% or more, 85% or more, 90% or more, 95% or more, 98% or more, or 100% amino acid sequence identity) to the following amino acid sequences:

PYL10:
(SEQ ID NO: 1095)
MNGDETKKVESEYIKKHHRHELVESQCSSTLVKHIKAPLHLVWSIVRRFD
EPQKYKPFISRCVVQGKKLEVGSVREVDLKSGLPATKSTEVLEILDDNEH
ILGIRIVGGDHRLKNYSSTISLHSETIDGKTGTLAIESFVVDVPEGNTKE
ETCFFVEALIQCNLNSLADVTERLQAESMEKKI;
PYL11:
(SEQ ID NO: 1096)
METSQKYHTCGSTLVQTIDAPLSLVWSILRRFDNPQAYKQFVKTCNLSSG
DGGEGSVREVTVVSGLPAEFSRERLDELDDESHVMMISIIGGDHRLVNYR
SKTMAFVAADTEEKTVVVESYVVDVPEGNSEEETTSFADTIVGFNLKSLA
KLSERVAHLKL
PYL12:
(SEQ ID NO: 1097)
MKTSQEQHVCGSTVVQTINAPLPLVWSILRRFDNPKTFKHFVKTCKLRSG
DGGEGSVREVTVVSDLPASFSLERLDELDDESHVMVISIIGGDHRLVNYQ
SKTTVFVAAEEEKTVVVESYVVDVPEGNTEEETTLFADTIVGCNLRSLAK
LSEKMMELT.
PYL13:
(SEQ ID NO: 1098)
MESSKQKRCRSSVVETIEAPLPLVWSILRSFDKPQAYQRFVKSCTMRSGG
GGGKGGEGKGSVRDVTLVSGFPADFSTERLEELDDESHVMVVSIIGGNHR
LVNYKSKTKVVASPEDMAKKTVVVESYVVDVPEGTSEEDTIFFVDNIIRY
NLTSLAKLTKKMMK.
PYL1:
(SEQ ID NO: 1099)
MANSESSSSPVNEEENSQRISTLHHQTMPSDLTQDEFTQLSQSIAEFHTY
QLGNGRCSSLLAQRIHAPPETVWSVVRRFDRPQIYKHFIKSCNVSEDFEM
RVGCTRDVNVISGLPANTSRERLDLLDDDRRVTGFSITGGEHRLRNYKSV
TTVHRFEKEEEEERIWTVVLESYVVDVPEGNSEEDTRLFADTVIRLNLQK
LASITEAMNRNNNNNNSSQVR.
PYL2:
(SEQ ID NO: 1100)
MSSSPAVKGLTDEEQKTLEPVIKTYHQFEPDPTTCTSLITQRIHAPASVV
WPLIRRFDNPERYKHFVKRCRLISGDGDVGSVREVTVISGLPASTSTERL
EFVDDDHRVLSFRVVGGEHRLKNYKSVTSVNEFLNQDSGKVYTVVLESYT
VDIPEGNTEEDTKMFVDTVVKLNLQKLGVAATSAPMHDDE.
PYL3:
(SEQ ID NO: 1101)
MNLAPIHDPSSSSTTTTSSSTPYGLTKDEFSTLDSIIRTHHTFPRSPNTC
TSLIAHRVDAPAHAIWRFVRDFANPNKYKHFIKSCTIRVNGNGIKEIKVG
TIREVSVVSGLPASTSVEILEVLDEEKRILSFRVLGGEHRLNNYRSVTSV
NEFVVLEKDKKKRVYSVVLESYIVDIPQGNTEEDTRMFVDTVVKSNLQNL
AVISTASPT.
PYL4:
(SEQ ID NO: 1102)
MLAVHRPSSAVSDGDSVQIPMMIASFQKRFPSLSRDSTAARFHTHEVGPN
QCCSAVIQEISAPISTVWSVVRRFDNPQAYKHFLKSCSVIGGDGDNVGSL
RQVHVVSGLPAASSTERLDILDDERHVISFSVVGGDHRLSNYRSVTTLHP
SPISGTVVVESYVVDVPPGNTKEETCDFVDVIVRCNLQSLAKIAENTAAE
SKKKMSL.
PYL5:
(SEQ ID NO: 1103)
MRSPVQLQHGSDATNGFHTLQPHDQTDGPIKRVCLTRGMHVPEHVAMHHT
HDVGPDQCCSSVVQMIHAPPESVWALVRRFDNPKVYKNFIRQCRIVQGDG
LHVGDLREVMVVSGLPAVSSTERLEILDEERHVISFSVVGGDHRLKNYRS
VTTLHASDDEGTVVVESYIVDVPPGNTEEETLSFVDTIVRCNLQSLARST
NRQ.
PYL6:
(SEQ ID NO: 1104)
MPTSIQFQRSSTAAEAANATVRNYPHHHQKQVQKVSLTRGMADVPEHVEL
SHTHVVGPSQCFSVVVQDVEAPVSTVWSILSRFEHPQAYKHFVKSCHVVI
GDGREVGSVREVRVVSGLPAAFSLERLEIMDDDRHVISFSVVGGDHRLMN
YKSVTTVHESEEDSDGKKRTRVVESYVVDVPAGNDKEETCSFADTIVRCN
LQSLAKLAENTSKFS.
PYL7:
(SEQ ID NO: 1105)
MEMIGGDDTDTEMYGALVTAQSLRLRHLHHCRENQCTSVLVKYIQAPVHL
VWSLVRRFDQPQKYKPFISRCTVNGDPEIGCLREVNVKSGLPATTSTERL
EQLDDEEHILGINIIGGDHRLKNYSSILTVHPEMIDGRSGTMVMESFVVD
VPQGNTKDDTCYFVESLIKCNLKSLACVSERLAAQDITNSIATFCNASNG
YREKNHTETNL.
PYL8:
(SEQ ID NO: 1106)
MEANGIENLTNPNQEREFIRRHHKHELVDNQCSSTLVKHINAPVHIVWSL
VRRFDQPQKYKPFISRCVVKGNMEIGTVREVDVKSGLPATRSTERLELLD
DNEHILSIRIVGGDHRLKNYSSIISLHPETIEGRIGTLVIESFVVDVPEG
NTKDETCYFVEALIKCNLKSLADISERLAVQDTTESRV.
PYL9:
(SEQ ID NO: 1107)
MMDGVEGGTAMYGGLETVQYVRTHHQHLCRENQCTSALVKHIKAPLHLVW
SLVRRFDQPQKYKPFVSRCTVIGDPEIGSLREVNVKSGLPATTSTERLEL
LDDEEHILGIKIIGGDHRLKNYSSILTVHPEIIEGRAGTMVIESFVVDVP
QGNTKDETCYFVEALIRCNLKSLADVSERLASQDITQ.
PYR1:
(SEQ ID NO: 1108)
MPSELTPEERSELKNSIAEFHTYQLDPGSCSSLHAQRIHAPPELVWSIVR
RFDKPQTYKHFIKSCSVEQNFEMRVGCTRDVIVISGLPANTSTERLDILD
DERRVTGFSIIGGEHRLTNYKSVTTVHRFEKENRIWTVVLESYVVDMPEG
NSEDDTRMFADTVVKLNLQKLATVAEAMARNSGDGSGSQVT.

[0476] In some cases, a heterologous polypeptide inserted in a Cas9 fusion polypeptide is derived from an ABI protein (also known as Abscisic Acid-Insensitive). For example a subject heterologous polypeptide can be derived from proteins such as those of Arabidopsis thaliana: ABI1 (Also known as ABSCISIC ACID-INSENSITIVE 1, Protein phosphatase 2C 56, AtPP2C56, P2C56, and PP2C ABI1) and/or ABI2 (also known as P2C77, Protein phosphatase 2C 77, AtPP2C77, ABSCISIC ACID-INSENSITIVE 2, Protein phosphatase 2C ABI2, and PP2C ABI2). For example, a suitable heterologous polypeptide can include an amino acid sequence having 75% or more amino acid sequence identity (e.g., 80% or more, 85% or more, 90% or more, 95% or more, 98% or more, or 100% amino acid sequence identity) to a contiguous stretch of from about 100 amino acids to about 110 amino acids (aa), from about 110 aa to about 115 aa, from about 115 aa to about 120 aa, from about 120 aa to about 130 aa, from about 130 aa to about 140 aa, from about 140 aa to about 150 aa, from about 150 aa to about 160 aa, from about 160 aa to about 170 aa, from about 170 aa to about 180 aa, from about 180 aa to about 190 aa, or from about 190 aa to about 200 aa of any of the following amino acid sequences:

ABI2:
(SEQ ID NO: 1109)
MEEVSPAIAGPFRPFSETQMDFTGIRLGKGYCNNQYSNQDSENGDLMVSL
PETSSCSVSGSHGSESRKVLISRINSPNLNMKESAAADIVVVDISAGDEI
NGSDITSEKKMISRTESRSLFEFKSVPLYGFTSICGRRPEMEDAVSTIPR
FLQSSSGSMLDGRFDPQSAAHFFGVYDGHGGSQVANYCRERMHLALAEEI
AKEKPMLCDGDTWLEKWKKALFNSFLRVDSEIESVAPETVGSTSVVAVVF
PSHIFVANCGDSRAVLCRGKTALPLSVDHKPDREDEAARIEAAGGKVIQW
NGARVFGVLAMSRSIGDRYLKPSIIPDPEVTAVKRVKEDDCLILASDGVW
DVMTDEEACEMARKRILLWHKKNAVAGDASLLADERRKEGKDPAAMSAAE
YLSKLAIQRGSKDNISVVVVDLKPRRKLKSKPLN;
and
ABI2:
(SEQ ID NO: 1110)
MDEVSPAVAVPFRPFTDPHAGLRGYCNGESRVTLPESSCSGDGAMKDSSF
EINTRQDSLTSSSSAMAGVDISAGDEINGSDEFDPRSMNQSEKKVLSRTE
SRSLFEFKCVPLYGVTSICGRRPEMEDSVSTIPRFLQVSSSSLLDGRVTN
GFNPHLSAHFFGVYDGHGGSQVANYCRERMHLALTEEIVKEKPEFCDGDT
WQEKWKKALFNSFMRVDSEIETVAHAPETVGSTSVVAVVFPTHIFVANCG
DSRAVLCRGKTPLALSVDHKPDRDDEAARIEAAGGKVIRWNGARVFGVLA
MSRSIGDRYLKPSVIPDPEVTSVRRVKEDDCLILASDGLWDVMTNEEVCD
LARKRILLWHKKNAMAGEALLPAEKRGEGKDPAAMSAAEYLSKMALQKGS
KDNISVVVVDLKGIRKFKSKSLN.

[0477] In some cases, a heterologous polypeptide inserted in a subject Cas9 fusion polypeptide is derived from a Cry2 protein (also known as cryptochrome 2). For example a subject heterologous polypeptide can be derived from Cry2 proteins from any organism (e.g., a plant) such as, but not limited to, those of Arabidopsis thaliana. For example, a suitable heterologous polypeptide can include an amino acid sequence having 75% or more amino acid sequence identity (e.g., 80% or more, 85% or more, 90% or more, 95% or more, 98% or more, or 100% amino acid sequence identity) to a contiguous stretch of from about 100 amino acids to about 110 amino acids (aa), from about 110 aa to about 115 aa, from about 115 aa to about 120 aa, from about 120 aa to about 130 aa, from about 130 aa to about 140 aa, from about 140 aa to about 150 aa, from about 150 aa to about 160 aa, from about 160 aa to about 170 aa, from about 170 aa to about 180 aa, from about 180 aa to about 190 aa, or from about 190 aa to about 200 aa of any of the following amino acid sequence:

Cry2 (Arabidopsis thaliana)
(SEQ ID NO: 1111)
MKMDKKTIVWFRRDLRIEDNPALAAAAHEGSVFPVFIWCPEEEGQFYPGR
ASRWWMKQSLAHLSQSLKALGSDLTLIKTHNTISAILDCIRVTGATKVVF
NHLYDPVSLVRDHTVKEKLVERGISVQSYNGDLLYEPWEIYCEKGKPFTS
FNSYWKKCLDMSIESVMLPPPWRLMPITAAAEAIWACSIEELGLENEAEK
PSNALLTRAWSPGWSNADKLLNEFIEKQLIDYAKNSKKVVGNSTSLLSPY
LHFGEISVRHVFQCARMKQIIWARDKNSEGEESADLFLRGIGLREYSRYI
CFNFPFTHEQSLLSHLRFFPWDADVDKFKAWRQGRTGYPLVDAGMRELWA
TGWMHNRIRVIVSSFAVKFLLLPWKWGMKYFWDTLLDADLECDILGWQYI
SGSIPDGHELDRLDNPALQGAKYDPEGEYIRQWLPELARLPTEWIHHPWD
APLTVLKASGVELGTNYAKPIVDIDTARELLAKAISRTREAQIMIGAAPD
EIVADSFEALGANTIKEPGLCPSVSSNDQQVPSAVRYNGSKRVKPEEEEE
RDMKKSRGFDERELFSTAESSSSSSVFFVSQSCSLASEGKNLEGIQDSSD
QITTSLGKNGCK.

[0478] In some cases, a heterologous polypeptide inserted in a subject Cas9 fusion polypeptide is derived from the CIB1 Arabidopsis thaliana protein (also known as transcription factor bHLH63). For example, a suitable heterologous polypeptide can include an amino acid sequence having 75% or more amino acid sequence identity (e.g., 80% or more, 85% or more, 90% or more, 95% or more, 98% or more, or 100% amino acid sequence identity) to a contiguous stretch of from about 100 amino acids to about 110 amino acids (aa), from about 110 aa to about 115 aa, from about 115 aa to about 120 aa, from about 120 aa to about 130 aa, from about 130 aa to about 140 aa, from about 140 aa to about 150 aa, from about 150 aa to about 160 aa, from about 160 aa to about 170 aa, from about 170 aa to about 180 aa, from about 180 aa to about 190 aa, or from about 190 aa to about 200 aa of the following amino acid sequence:

(SEQ ID NO: 1112)
MNGAIGGDLLLNFPDMSVLERQRAHLKYLNPTFDSPLAGFFADSSMITGG
EMDSYLSTAGLNLPMMYGETTVEGDSRLSISPETTLGTGNFKKRKFDTET
KDCNEKKKKMTMNRDDLVEEGEEEKSKITEQNNGSTKSIKKMKHKAKKEE
NNFSNDSSKVTKELEKTDYIHVRARRGQATDSHSIAERVRREKISERMKF
LQDLVPGCDKITGKAGMLDEIINYVQSLQRQIEFLSMKLAIVNPRPDFDM
DDIFAKEVASTPMTVVPSPEMVLSGYSHEMVHSGYSSEMVNSGYLHVNPM
QQVNTSSDPLSCFNNGEAPSMWDSHVQNLYGNLGV.

[0479] In some cases, a heterologous polypeptide inserted in a subject Cas9 fusion polypeptide is derived from the GAI Arabidopsis thaliana protein (also known as Gibberellic Acid Insensitive, and DELLA protein GAI). For example, a suitable heterologous polypeptide can include an amino acid sequence having 75% or more amino acid sequence identity (e.g., 80% or more, 85% or more, 90% or more, 95% or more, 98% or more, or 100% amino acid sequence identity) to a contiguous stretch of from about 100 amino acids to about 110 amino acids (aa), from about 110 aa to about 115 aa, from about 115 aa to about 120 aa, from about 120 aa to about 130 aa, from about 130 aa to about 140 aa, from about 140 aa to about 150 aa, from about 150 aa to about 160 aa, from about 160 aa to about 170 aa, from about 170 aa to about 180 aa, from about 180 aa to about 190 aa, or from about 190 aa to about 200 aa of the following amino acid sequence:

(SEQ ID NO: 1113)
MKRDHHHHHHQDKKTMMMNEEDDGNGMDELLAVLGYKVRSSEMADVAQKL
EQLEVMMSNVQEDDLSQLATETVHYNPAELYTWLDSMLTDLNPPSSNAEY
DLKAIPGDAILNQFAIDSASSSNQGGGGDTYTTNKRLKCSNGVVETTTAT
AESTRHVVLVDSQENGVRLVHALLACAEAVQKENLTVAEALVKQIGFLAV
SQIGAMRKVATYFAEALARRIYRLSPSQSPIDHSLSDTLQMHFYETCPYL
KFAHFTANQAILEAFQGKKRVHVIDFSMSQGLQWPALMQALALRPGGPPV
FRLTGIGPPAPDNFDYLHEVGCKLAHLAEAIHVEFEYRGFVANTLADLDA
SMLELRPSEIESVAVNSVFELHKLLGRPGAIDKVLGVVNQIKPEIFTVVE
QESNHNSPIFLDRFTESLHYYSTLFDSLEGVPSGQDKVMSEVYLGKQICN
VVACDGPDRVERHETLSQWRNRFGSAGFAAAHIGSNAFKQASMLLALFNG
GEGYRVEESDGCLMLGWHTRPLIATSAWKLSTN.

[0480] In some cases, a heterologous polypeptide inserted in a subject Cas9 fusion polypeptide is derived from a GID1 Arabidopsis thaliana protein (also known as Gibberellin receptor GID1). For example, a suitable heterologous polypeptide can include an amino acid sequence having 75% or more amino acid sequence identity (e.g., 80% or more, 85% or more, 90% or more, 95% or more, 98% or more, or 100% amino acid sequence identity) to a contiguous stretch of from about 100 amino acids to about 110 amino acids (aa), from about 110 aa to about 115 aa, from about 115 aa to about 120 aa, from about 120 aa to about 130 aa, from about 130 aa to about 140 aa, from about 140 aa to about 150 aa, from about 150 aa to about 160 aa, from about 160 aa to about 170 aa, from about 170 aa to about 180 aa, from about 180 aa to about 190 aa, or from about 190 aa to about 200 aa of any of the following amino acid sequences: GID1A:

GID1A:
(SEQ ID NO: 1114)
MAASDEVNLIESRTVVPLNTWVLISNFKVAYNILRRPDGTFNRHLAEYLD
RKVTANANPVDGVFSFDVLIDRRINLLSRVYRPAYADQEQPPSILDLEKP
VDGDIVPVILFFHGGSFAHSSANSAIYDTLCRRLVGLCKCVVVSVNYRRA
PENPYPCAYDDGWIALNWVNSRSWLKSKKDSKVHIFLAGDSSGGNIAHNV
ALRAGESGIDVLGNILLNPMFGGNERTESEKSLDGKYFVTVRDRDWYWKA
FLPEGEDREHPACNPFSPRGKSLEGVSFPKSLVVVAGLDLIRDWQLAYAE
GLKKAGQEVKLMHLEKATVGFYLLPNNNHFHNVMDEISAFVNAEC.
GID1B:
(SEQ ID NO: 1115)
MAGGNEVNLNECKRIVPLNTWVLISNFKLAYKVLRRPDGSFNRDLAEFLD
RKVPANSFPLDGVFSFDHVDSTTNLLTRIYQPASLLHQTRHGTLELTKPL
STTEIVPVLIFFHGGSFTHSSANSAIYDTFCRRLVTICGVVVVSVDYRRS
PEHRYPCAYDDGWNALNWVKSRVWLQSGKDSNVYVYLAGDSSGGNIAHNV
AVRATNEGVKVLGNILLHPMFGGQERTQSEKTLDGKYFVTIQDRDWYWRA
YLPEGEDRDHPACNPFGPRGQSLKGVNFPKSLVVVAGLDLVQDWQLAYVD
GLKKTGLEVNLLYLKQATIGFYFLPNNDHFHCLMEELNKFVHSIEDSQSK
SSPVLLTP
GID1C:
(SEQ ID NO: 1116)
MAGSEEVNLIESKTVVPLNTWVLISNFKLAYNLLRRPDGTFNRHLAEFLD
RKVPANANPVNGVFSFDVIIDRQTNLLSRVYRPADAGTSPSITDLQNPVD
GEIVPVIVFFHGGSFAHSSANSAIYDTLCRRLVGLCGAVVVSVNYRRAPE
NRYPCAYDDGWAVLKWVNSSSWLRSKKDSKVRIFLAGDSSGGNIVHNVAV
RAVESRIDVLGNILLNPMFGGTERTESEKRLDGKYFVTVRDRDWYWRAFL
PEGEDREHPACSPFGPRSKSLEGLSFPKSLVVVAGLDLIQDWQLKYAEGL
KKAGQEVKLLYLEQATIGFYLLPNNNHFHTVMDEIAAFVNAECQ.

### Allosteric Modulation

[0481] In some cases, the heterologous polypeptide present in a Cas9 fusion polypeptide of the present disclosure confers an inducible conformational change on the Cas9 fusion polypeptide. In some cases, a variant Cas9 polypeptide of the present disclosure comprises a heterologous polypeptide that modifies the ability of the Cas9 polypeptide to bind to and/or cleave a target nucleic acid. For example, in some cases, a variant Cas9 polypeptide of the present disclosure comprises a heterologous polypeptide that reversibly modifies the ability of the Cas9 polypeptide to bind to and/or cleave a target nucleic acid (e.g., the heterologous polypeptide can confer an inducible conformational change on the Cas9 fusion polypeptide). The heterologous polypeptide can modify the ability of the Cas9 polypeptide to bind to and/or cleave a target nucleic acid by an allosteric mechanism, e.g., where binding of a small molecule to the heterologous polypeptide induces a conformational change in the variant Cas9 polypeptide. In some cases, the small molecule enhances the ability of the Cas9 polypeptide to bind to and/or cleave a target nucleic acid. In some cases, the small molecule reduces the ability of the Cas9 polypeptide to bind to and/or cleave a target nucleic acid.

[0482] The heterologous polypeptide that confers allosteric modulation of Cas9 may be any suitable polypeptide domain that changes conformation upon binding of a ligand (and thus confers an inducible conformational change on the Cas9 fusion polypeptide), e.g., a small molecule, hormone, cellular metabolite, ions, etc. The heterologous polypeptide may include all, or at least a ligand binding domain, of a metal ion-binding protein, cyclic nucleotide-binding protein (e.g., cAMP-dependent protein kinase, cGMP-dependent protein kinase, cyclic nucleotide-gated channel), hydrolase, ATP-binding protein, GTP-binding protein, nitric monoxide synthase, bacterial metabolite sensing proteins (e.g., glucose-binding protein, maltose-binding protein), hormone receptor, G-protein coupled receptor (GPCR), etc.

[0483] In some cases, the heterologous polypeptide includes a calcium binding protein, or a calcium binding domain thereof. The calcium binding protein may be any suitable calcium binding protein, such as, but not limited to, EF-hand containing proteins or a calcium-sensing GPCR. Suitable EF-hand containing proteins include, without limitation, calmodulin, troponin C, and S100 proteins. In some embodiments, the heterologous peptide includes one or more, e.g., 2 or more, 3 or more, and up to 4 EF hand domains of the EF-hand containing protein, such as troponin C and calmodulin. In some cases, the heterologous peptide includes an EF-hand containing polypeptide, e.g., calmodulin, and a helical peptide that binds to the EF-hand containing polypeptide when the EF-hand containing polypeptide is bound to calcium. The helical peptide may be the M13 domain of a myosin light chain kinase, or any other suitable helical peptide.

[0484] In some cases, the heterologous polypeptide includes a zinc binding protein, or a suitable zinc binding domain thereof. The zinc binding protein may be any suitable zinc binding protein, such as, but not limited to, zinc finger containing proteins and metallothioneins. Suitable zinc finger containing proteins include, without limitation, zinc-responsive transcription factor (Zap1) and metal regulatory transcription factor 1 (MTF1). In some embodiments, the heterologous peptide includes one or more, e.g., 2 or more, 3 or more, and up to 4 zinc finger domains of the zinc finger containing protein, such as Zap-1 and MTF1.

[0485] In some cases, the heterologous polypeptide includes a magnesium binding protein, or a suitable magnesium binding domain thereof. The magnesium binding protein may be any suitable magnesium binding protein, such as, but not limited to, human centrin protein 3.

[0486] In some cases, the heterologous polypeptide includes a cyclic monophosphate nucleotide (e.g., cAMP, cGMP) binding protein, or a suitable binding domain thereof. The heterologous polypeptide may include a cyclic nucleotide binding domain from any suitable cyclic nucleotide binding protein, including, but not limited to, protein kinase A (PKA), exchange protein activated by cyclic AMP (epac), protein kinase G (PKG), phosphodiesterase, and MloK1.

[0487] In some embodiments, the heterologous polypeptide includes a GTP-binding protein, e.g., a small GTPase protein (G protein). The GTP-binding protein may be any suitable GTP-binding protein. In certain cases, the heterologous polypeptide includes a G protein, including, but not limited to, Ras, Rho, Ran, Rab and Arf GTPases. In some cases, the heterologous polypeptide includes a G protein (e.g., Ras, Rap 1) and a G-protein binding domain of a G-protein-interacting protein (e.g., Raf kinase).

[0488] In some cases, the heterologous polypeptide includes a bacterial metabolite sensing proteins, such as a periplasmic binding protein (PBP). The heterologous polypeptide may include any suitable PBP, such as, but not limited to glucose-binding protein, maltose-binding protein, etc., or a suitable binding domain thereof. The glucose-binding protein may be any suitable glucose-binding protein, such as, but not limited to, MglB.

[0489] In some cases, the heterologous polypeptide includes a receptor, e.g., a hormone receptor, metabolite receptor, GPCR, or any other suitable receptor, or a suitable portion thereof. In some cases, the heterologous polypeptide includes a hormone receptor, or a portion thereof. In some cases, the heterologous polypeptide includes a ligand-binding domain of the hormone receptor. The hormone receptor may be any suitable hormone receptor, including, but not limited to an estrogen receptor, estrogen-related receptor, androgen receptor, glucocorticoid receptor, mineralocorticoid receptor, progesterone receptor, retinoic acid receptor, vitamin D receptor, thyroid hormone receptor, peroxisome proliferator-activated receptor (PPAR), Rev-ErbA receptor, RAR-related orphan receptor, liver X receptor, farnesoid X receptor, pregnane X receptor, constitutive androstane receptor, hepatocyte nuclear factor-4, retinoid receptor, testicular receptor, nerve growth factor IB, nuclear receptor related 1, neuron-derived orphan receptor, steroidogenic factor 1, liver receptor homolog-1, germ cell nuclear factor, or any other hormone receptor. In some cases, the hormone receptor is an estrogen receptor. In certain embodiments, the heterologous polypeptide contains the ligand binding domain of an estrogen receptor, e.g., estrogen receptor alpha. In some cases, the heterologous polypeptide contains an amino acid sequence at least 90%, e.g., at least 95%, at least 98%, at least 99%, or 100% identical to the sequence set forth in SEQ ID NO:1080 (FIG. 21B).

[0490] The heterologous polypeptide that confers allosteric modulation of Cas9 may be any suitable polypeptide domain that changes conformation upon post-translational modification of the domain, including, but not limited to phosphorylation, acetylation, formylation, methylation, amidation, butyrylation, gamma-carboxylation, glycosylation, malonylation, hydroxylation, ADP-ribosylation, oxidation, adenylylation, propionylation, S-glutathionylation, S-nitrosylation, succinylation, sulfation, ubiquitination, SUMOylation, Neddylation, Pupylation. In some embodiments, the heterologous polypeptide includes a substrate for post-translational modification. In some instances, the heterologous polypeptide includes a substrate for post-translational modification, and a binding domain that binds the substrate upon post-translational medication. Thus, in some embodiments, the heterologous polypeptide includes a PKA substrate peptide from a cAMP response element binding protein (CREB). In some cases, the heterologous polypeptide includes a PKA substrate peptide from CREB and a phospho-peptide binding domain (such as a phosphoserine/threonine binding domain from a 14-3-3 protein). In some cases, the substrate is a mitogen-activated protein kinase (MAPK) substrate and the binding domain is a phospho-peptide binding domain (e.g., a MAPK substrate peptide from Cdc25C, and the proline-directed WW phospho-binding domain; a MAPK substrate peptide from the Epidermal Growth Factor Receptor (EGFR), and the Forkhead-Associated 2 domain). In certain embodiments, the heterologous polypeptide contains a kinase substrate in Src, Abl or EGFR and a phosphotyrosine binding SH2 domain. In some embodiments, the heterologous polypeptide contains a kinase substrate for autophosphorylation in human Cyclin B 1 and a Polo Box Domain of Plk1. The heterologous polypeptide can include any other suitable combination of a post-translational modification substrate and a corresponding post-translational modification binding domain.

[0491] The heterologous polypeptide that confers allosteric modulation of Cas9 may be any suitable polypeptide domain that changes conformation upon exposure to electromagnetic radiation, e.g., exposure to an appropriate wavelength of light. The light-sensitive heterologous polypeptide may be derived from any suitable light-sensitive protein. Examples of light-sensitive proteins include, but are not limited to, Light-Oxygen-Voltage (LOV), Cryptochrome (CRYs), Blue-light-using FAD (BLUF), Phytochrome (PHY), UVR8, and opsin families of proteins. In some instances, the heterologous polypeptide may include all, or a suitable portion thereof, of the LOV2 domain of Avena sativa phototropin 1 (AsLOV2), a fungal circadian clock photoreceptor Vivid (VVD), a Bacillus subtilis stress response protein (YtvA), a FLAVIN-BINDING, KELCH REPEAT, F-BOX 1 essential to plant flowering (FKF1), and a 222 amino acid LOV-transcription factor present in Erythrobacter litoralis (EL222). For additional examples, see, e.g., Kawano et al., Nat Commun. 2015 Feb. 24; 6:6256, which discloses pairs of distinct photoswitches called ‘magnets’ engineered to recognize each other based on electrostatic interactions.

### Signaling Polypeptides

[0492] In some cases, a Cas9 fusion polypeptide of the present disclosure comprises a heterologous polypeptide that is a substrate for post-translational modification of the variant Cas9 polypeptide. The heterologous polypeptide can modify the ability of the Cas9 polypeptide to bind to and/or cleave a target nucleic acid by, e.g., inducing degradation of the Cas9 polypeptide. In some cases, the heterologous polypeptide includes an E3 ubiquitin ligase substrate, such as, but not limited to, an E3 ubiquitin ligase substrate from Cdt1 and Germinin.

[0493] In some embodiments, the heterologous polypeptide can provide for increased or decreased stability (i.e., the heterologous polypeptide is a stability control peptide, e.g., a degron, which in some cases is controllable (e.g., a temperature sensitive or drug controllable degron sequence). In some embodiments, the heterologous polypeptide can provide for increased or decreased transcription from the target nucleic acid (i.e., the heterologous polypeptide is a transcription modulation sequence, e.g., a transcription factor/activator or a fragment thereof, a protein or fragment thereof that recruits a transcription factor/activator, a transcription repressor or a fragment thereof, a protein or fragment thereof that recruits a transcription repressor, a small molecule/drug-responsive transcription regulator, etc.). In some embodiments, the heterologous polypeptide can provide a binding domain (i.e., the heterologous polypeptide is a protein binding sequence, e.g., to provide the ability of a Cas9 fusion polypeptide to bind to another protein of interest, e.g., a DNA or histone modifying protein, a transcription factor or transcription repressor, a recruiting protein, an RNA modification enzyme, an RNA-binding protein, a translation initiation factor, an RNA splicing factor, etc.).

[0494] Suitable heterologous polypeptides that provide for increased or decreased stability include, but are not limited to degron sequences. Degrons are readily understood by one of ordinary skill in the art to be amino acid sequences that control the stability of the protein of which they are part. For example, the stability of a protein comprising a degron sequence is controlled in part by the degron sequence. In some cases, a suitable degron is constitutive such that the degron exerts its influence on protein stability independent of experimental control (i.e., the degron is not drug inducible, temperature inducible, etc.) In some cases, the degron provides the Cas9 fusion polypeptide with controllable stability such that the Cas9 fusion polypeptide can be turned “on” (i.e., stable) or “off” (i.e., unstable, degraded) depending on the desired conditions. For example, if the degron is a temperature sensitive degron, the Cas9 fusion polypeptide may be functional (i.e., “on”, stable) below a threshold temperature (e.g., 42° C., 41° C., 40° C., 39° C., 38° C., 37° C., 36° C., 35° C., 34° C., 33° C., 32° C., 31° C., 30° C., etc.) but non-functional (i.e., “off”, degraded) above the threshold temperature. As another example, if the degron is a drug inducible degron, the presence or absence of drug can switch the protein from an “off” (i.e., unstable) state to an “on” (i.e., stable) state or vice versa. An exemplary drug inducible degron is derived from the FKBP12 protein. The stability of the degron is controlled by the presence or absence of a small molecule that binds to the degron.

[0495] Examples of suitable degrons include, but are not limited to those degrons controlled by Shield-1, DHFR, auxins, and/or temperature. Non-limiting examples of suitable degrons are known in the art (e.g., Dohmen et al., Science, 1994. 263(5151): p. 1273-1276: Heat-inducible degron: a method for constructing temperature-sensitive mutants; Schoeber et al., Am J Physiol Renal Physiol. 2009 January; 296(1):F204-11: Conditional fast expression and function of multimeric TRPV5 channels using Shield-1; Chu et al., Bioorg Med Chem Lett. 2008 Nov. 15; 18(22):5941-4: Recent progress with FKBP-derived destabilizing domains; Kanemaki, Pflugers Arch. 2012 Dec. 28: Frontiers of protein expression control with conditional degrons; Yang et al., Mol Cell. 2012 Nov. 30; 48(4):487-8: Titivated for destruction: the methyl degron; Barbour et al., Biosci Rep. 2013 Jan. 18; 33(1): Characterization of the bipartite degron that regulates ubiquitin-independent degradation of thymidylate synthase; and Greussing et al., J Vis Exp. 2012 Nov. 10; (69): Monitoring of ubiquitin-proteasome activity in living cells using a Degron (dgn)-destabilized green fluorescent protein (GFP)-based reporter protein; all of which are hereby incorporated in their entirety by reference).

### Targeting Polypeptides

[0496] In some cases, a Cas9 fusion polypeptide of the present disclosure comprises a heterologous polypeptide that provides for targeting of the variant Cas9 polypeptide to a particular cell type, to a particular location within the body, to a particular location within a cell. The heterologous polypeptide may be any suitable polypeptide that can target the variant Cas9 to a location of interest. The target location of interest may be a target organ, such as the brain, heart, skin, retina, intestine, lung, kidney, adrenal gland, liver, bladder, spleen, thymus, prostate, testis, ovary, uterus, mammary or any other organ. The target location of interest may be a target tissue or cell type, such as blood vessel, muscle, epithelium, fat, cartilage, bone marrow, neuron, myocyte, chondrocyte, osteocyte, adipocyte, lymphocyte, or any other tissue or cell type. The target location of interest may be a target organelle or subcellular location, such as the nucleus, mitochondria, lysosome, endoplasmic reticulum, golgi, nucleolus, centrosome, endosome, plasma membrane, chloroplast, or any other organelle or subcellular location. The target location of interest may be healthy, or may be pathophysiological, such as cancerous, inflammatory, diabetic, ischemic, or have any other pathology.

[0497] In some cases, a targeting heterologous polypeptide includes a RGD-4C, NGR, or GSL peptide that target angiogenic vasculature of tumors. In some cases, a targeting heterologous polypeptide includes a polypeptide that targets bone marrow, prostate, placenta, adipose tissue, ovary, ureter or spleen, as described in U.S. Pat. No. 8,710,017, which is incorporated herein by reference. Other suitable targeting heterologous polypeptides are described in, e.g., Li et al., Methods Mol Biol. 2014, 1108:57; Kanki, et al., J Mol Cell Cardiol. 2011, 50:841; Veleva et al., Molecules. 2011, 16:900; and Rangel et al., Nat Commun. 2012, 3:788, which are incorporated by reference herein.

[0498] In some cases, a heterologous polypeptide provides for subcellular localization, i.e., the heterologous polypeptide contains a subcellular localization sequence (e.g., a nuclear localization signal (NLS) for targeting to the nucleus, a sequence to keep the fusion protein out of the nucleus, e.g., a nuclear export sequence (NES), a sequence to keep the fusion protein retained in the cytoplasm, a mitochondrial localization signal for targeting to the mitochondria, a chloroplast localization signal for targeting to a chloroplast, an ER retention signal, and the like). In some embodiments, a Cas9 fusion polypeptide does not include a NLS so that the protein is not targeted to the nucleus (which can be advantageous, e.g., when the target nucleic acid is an RNA that is present in the cyosol). In some embodiments, the heterologous polypeptide can provide a tag (i.e., the heterologous polypeptide is a detectable label) for ease of tracking and/or purification (e.g., a fluorescent protein, e.g., green fluorescent protein (GFP), YFP, RFP, CFP, mCherry, tdTomato, and the like; a histidine tag, e.g., a 6×His tag; a hemagglutinin (HA) tag; a FLAG tag; a Myc tag; and the like).

[0499] In some cases, the heterologous polypeptide includes a lipid-binding protein, or a suitable lipid binding domain thereof. The heterologous polypeptide may include any suitable lipid-binding domain, including, but not limited to, a pleckstrin homology (PH) domain, a protein kinase C (PKC) conserved 1 (C1-) and conserved 2 (C2-) domains.

[0500] In some cases, a Cas9 fusion polypeptide includes a “Protein Transduction Domain” or PTD (also known as a CPP—cell penetrating peptide), which refers to a polypeptide, polynucleotide, carbohydrate, or organic or inorganic compound that facilitates traversing a lipid bilayer, micelle, cell membrane, organelle membrane, or vesicle membrane. A PTD attached to another molecule, which can range from a small polar molecule to a large macromolecule and/or a nanoparticle, facilitates the molecule traversing a membrane, for example going from extracellular space to intracellular space, or cytosol to within an organelle. In some embodiments, a PTD is covalently linked to the amino terminus a polypeptide (e.g., a Cas9 fusion polypeptide). In some embodiments, a PTD is covalently linked to the carboxyl terminus of a polypeptide (e.g., a Cas9 fusion polypeptide). In some cases, the PTD is inserted interally in the Cas9 fusion polypeptide (i.e., is not at the N- or C-terminus of the Cas9 fusion polypeptide) at a suitable insertion site, as described herein. In some cases, a subject Cas9 fusion polypeptide includes (is conjugated to, is fused to) one or more PTDs (e.g., two or more, three or more, four or more PTDs). In some cases a PTD includes a nuclear localization signal (NLS) (e.g, in some cases 2 or more, 3 or more, 4 or more, or 5 or more NLSs). Thus, in some cases, a Cas9 fusion polypeptide includes one or more NLSs (e.g., 2 or more, 3 or more, 4 or more, or 5 or more NLSs). In some embodiments, a PTD is covalently linked to a nucleic acid (e.g., a Cas9 guide nucleic acid, a polynucleotide encoding a Cas9 guide nucleic acid, a polynucleotide encoding a Cas9 fusion polypeptide, a donor polynucleotide, etc.). Examples of PTDs include but are not limited to a minimal undecapeptide protein transduction domain (corresponding to residues 47-57 of HIV-1 TAT comprising YGRKKRRQRRR; SEQ ID NO: 1117); a polyarginine sequence comprising a number of arginines sufficient to direct entry into a cell (e.g., 3, 4, 5, 6, 7, 8, 9, 10, or 10-50 arginines); a VP22 domain (Zender et al. (2002) Cancer Gene Ther. 9(6):489-96); an Drosophila Antennapedia protein transduction domain (Noguchi et al. (2003) Diabetes 52(7):1732-1737); a truncated human calcitonin peptide (Trehin et al. (2004) Pharm. Research 21:1248-1256); polylysine (Wender et al. (2000) Proc. Natl. Acad. Sci. USA 97:13003-13008); RRQRRTSKLMKR (SEQ ID NO: 1118); Transportan GWTLNSAGYLLGKINLKALAALAKKIL (SEQ ID NO:1119); KALAWEAKLAKALAKALAKHLAKALAKALKCEA (SEQ ID NO:1120); and RQIKIWFQNRRMKWKK (SEQ ID NO:1121). Exemplary PTDs include but are not limited to, YGRKKRRQRRR (SEQ ID NO:1122), RKKRRQRRR (SEQ ID NO:1123); an arginine homopolymer of from 3 arginine residues to 50 arginine residues; Exemplary PTD domain amino acid sequences include, but are not limited to, any of the following: YGRKKRRQRRR (SEQ ID NO:1124); RKKRRQRR (SEQ ID NO:1125); YARAAARQARA (SEQ ID NO:1126); THRLPRRRRRR (SEQ ID NO:1127); and GGRRARRRRRR (SEQ ID NO:1128). In some embodiments, the PTD is an activatable CPP (ACPP) (Aguilera et al. (2009) Integr Biol (Camb) June; 1(5-6): 371-381). ACPPs comprise a polycationic CPP (e.g., Arg9 or “R9”) connected via a cleavable linker to a matching polyanion (e.g., Glu9 or “E9”), which reduces the net charge to nearly zero and thereby inhibits adhesion and uptake into cells. Upon cleavage of the linker, the polyanion is released, locally unmasking the polyarginine and its inherent adhesiveness, thus “activating” the ACPP to traverse the membrane.

### Conjugation Sites

[0501] In some cases, a variant Cas9 polypeptide of the present disclosure comprises a heterologous polypeptide that provides a conjugation site for conjugation to a second moiety via bioorthogonal chemistry. The conjugation site may be a site for any suitable biorthogonal chemistry. Examples of bioorthogonal chemistries include, but are not limited to, [3±2]cycloadditions, Staudinger ligation, oxime ligation or hydrazone ligation (Dirksen et al., Biocong. Chem. 19:2543-2548 (2008)), inverse electron demand Diels-Alder (e.g., tetrazine ligation (Blackman et al., J. Am. Chem. Soc. 130:13518-13519 (2008)), and [2+2+2]cycloaddition (e.g., quadricyclane ligation (Sletten et al., J. Am. Chem. Soc. 133:17570-17573 (2011)).

[0502] In some embodiments, a Cas9 fusion polypeptide contains a heterologous polypeptide that provides a conjugation site for conjugation to a second moiety via a conjugation chemistry, where the Cas9 fusion polypeptide is modified to remove conjugation sites that are not in the heterologous polypeptide. In some cases, the conjugation site contains at least one sulfhydryl moiety (e.g., a cysteine residue) for reacting with a sulfhydryl-reactive chemical group (e.g., maleimide, haloacetyl, pyridyldisulfied, thiosulfonate, vinylsulfone, etc.) and the Cas9 fusion polypeptide does not contain a sulfhydryl moiety (e.g., a cysteine residue) outside of the heterologous polypeptide sequence. In some cases, the conjugation site contains a single sulfhydryl moiety for reacting with a sulfhydryl-reactive chemical group and the Cas9 fusion polypeptide does not contain a sulfhydryl moiety outside of the heterologous polypeptide sequence. Where the Cas9 fusion polypeptide does not contain a sulfhydryl moiety outside of the heterologous polypeptide sequence, such a Cas9 fusion polypeptide has been modified to remove naturally existing cysteines (e.g., a cysteine residue corresponding to C80 and/or C574 of the S. pyogenes Cas9 protein set forth in SEQ ID NO:5). For example, in some cases, naturally existing cysteines are removed and/or mutated (e.g., substituted to a serine residue, e.g., a substitution to serine of the cysteine residue corresponding to C80 and/or C574 of the S. pyogenes Cas9 protein set forth in SEQ ID NO:5, e.g., C80S and/or C574S).

[0503] In some cases, a Cas9 fusion polypeptide of the present disclosure comprises a heterologous polypeptide that provides an attachment site. In some cases, a Cas9 fusion polypeptide of the present disclosure comprises: a) a Cas9 polypeptide that has been modified such that it does not include any Cys residues (e.g., Cys residues found in a naturally-occurring Cas9 polypeptide; and b) an insertion of a single Cys residue at an insertion site as indicated above. In some cases, a Cas9 fusion polypeptide of the present disclosure comprises: a) a Cas9 polypeptide that has been modified such that it does not include any Cys residues (e.g., Cys residues found in a naturally-occurring Cas9 polypeptide; and b) an insertion of a single non-coded amino acid residue at an insertion site as indicated above. In some cases, a Cas9 fusion polypeptide of the present disclosure comprises: a) a Cas9 polypeptide that has been modified such that it does not include any Cys residues (e.g., Cys residues found in a naturally-occurring Cas9 polypeptide; and b) a heterologous polypeptide that comprises a single Cys residue inserted into the Cas9 polypeptide at an insertion site as indicated above, where the single Cys residue provides an attachment site for a second moiety. In some cases, a Cas9 fusion polypeptide of the present disclosure comprises: a) a Cas9 polypeptide; and b) a heterologous polypeptide that comprises a single non-coded amino acid residue inserted into the Cas9 polypeptide at an insertion site as indicated above, where the single non-coded amino acid residue provides an attachment site for a second moiety. Suitable non-coded amino acids include azide-modified amino acids, where the azide moiety provides an attachment site for modified phosphine-mediated, or strained cycloalkyne-mediated, etc., attachment of a second moiety.

[0504] The second moiety attached to the Cas9 fusion polypeptide can be a small molecule, a polypeptide, a lipid, a sugar, a polysaccharide, and the like. Small molecules (e.g., compounds having a molecular weight of less than 2000 daltons) can include therapeutic agents; cancer chemotherapeutic agents; cell targeting agents; DNA damaging agents; imaging agents; and the like.

### Functional Polypeptides

[0505] In some cases, a Cas9 fusion polypeptide (e.g., a Cas9 polypeptide having a heterologous polypeptide that provides an activity) has enzymatic activity that modifies target nucleic acid (e.g., nuclease activity (which can be provided by the Cas9 sequences, but can alternatively be provided by exogenous amino acid sequences), methyltransferase activity, demethylase activity, DNA repair activity, DNA damage activity, deamination activity, dismutase activity, alkylation activity, depurination activity, oxidation activity, pyrimidine dimer forming activity, integrase activity, transposase activity, recombinase activity, polymerase activity, ligase activity, helicase activity, photolyase activity or glycosylase activity) and/or a polypeptide (e.g., a histone) associated with target nucleic acid (e.g., methyltransferase activity, demethylase activity, acetyltransferase activity, deacetylase activity, kinase activity, phosphatase activity, ubiquitin ligase activity, deubiquitinating activity, adenylation activity, deadenylation activity, SUMOylating activity, deSUMOylating activity, ribosylation activity, deribosylation activity, myristoylation activity or demyristoylation activity).

[0506] In some embodiments, a Cas9 fusion polypeptide contains a heterologous polypeptide and can bind and/or modify a target nucleic acid (e.g., cleave, methylate, demethylate, etc.) and/or modify a polypeptide associated with target nucleic acid (e.g., methylation, acetylation, etc., of, for example, a histone tail) and/or modulate transcription of a target nucleic acid. In some cases, a Cas9 fusion polypeptide with a heterologous polypeptide has reduced nuclease activity (e.g., as described above) and contains a heterologous polypeptide that provides an activity that will be exhibited by the Cas9 fusion polypeptide (e.g., target cleavage, target methylation, transcription modulation, etc.).

[0507] In some such cases, a method of binding, e.g., in some cases where the Cas9 fusion polypeptide contains a heterologous polypeptide with an activity (e.g., an enzymatic activity) that modifies the target nucleic acid, the method can also be considered to be a method of modifying the target nucleic acid. In some cases, a method of binding a target nucleic acid (e.g., a single or double stranded target nucleic acid) can result in modification of the target nucleic acid. Thus, in some cases, a method of binding a target nucleic acid (e.g., a single or double stranded target nucleic acid) can be a method of modifying the target nucleic acid.

[0508] Suitable heterologous polypeptide include, but are not limited to, a polypeptide that provides for methyltransferase activity, demethylase activity, acetyltransferase activity, deacetylase activity, kinase activity, phosphatase activity, ubiquitin ligase activity, deubiquitinating activity, adenylation activity, deadenylation activity, SUMOylating activity, deSUMOylating activity, ribosylation activity, deribosylation activity, myristoylation activity, or demyristoylation activity, any of which can be directed at modifying nucleic acid directly (e.g., methylation of DNA or RNA) or at modifying a nucleic acid-associated polypeptide (e.g., a histone, a DNA binding protein, and RNA binding protein, and the like). Further suitable heterologous polypeptides include, but are not limited to boundary elements (e.g., CTCF), proteins and fragments thereof that provide periphery recruitment (e.g., Lamin A, Lamin B, etc.), and protein docking elements (e.g., FKBP/FRB, Pil1/Aby1, etc.).

[0509] Examples of various additional suitable heterologous polypeptide (or fragments thereof) for a subject Cas9 fusion polypeptide include, but are not limited to those described in the PCT patent applications: WO2010075303, WO2012068627, and WO2013155555, and can be found, for example, in U.S. patents and patent applications: U.S. Pat. Nos. 8,906,616; 8,895,308; 8,889,418; 8,889,356; 8,871,445; 8,865,406; 8,795,965; 8,771,945; 8,697,359; 20140068797; 20140170753; 20140179006; 20140179770; 20140186843; 20140186919; 20140186958; 20140189896; 20140227787; 20140234972; 20140242664; 20140242699; 20140242700; 20140242702; 20140248702; 20140256046; 20140273037; 20140273226; 20140273230; 20140273231; 20140273232; 20140273233; 20140273234; 20140273235; 20140287938; 20140295556; 20140295557; 20140298547; 20140304853; 20140309487; 20140310828; 20140310830; 20140315985; 20140335063; 20140335620; 20140342456; 20140342457; 20140342458; 20140349400; 20140349405; 20140356867; 20140356956; 20140356958; 20140356959; 20140357523; 20140357530; 20140364333; and 20140377868; all of which are hereby incorporated by reference in their entirety.

[0510] For example, suitable heterologous polypeptides include, but are not limited to, a polypeptide that provides an activity that indirectly increases transcription by acting directly on the target nucleic acid or on a polypeptide (e.g., a histone, a DNA-binding protein, an RNA-binding protein, an RNA editing protein, etc.) associated with the target nucleic acid. Suitable heterologous polypeptides include, but are not limited to, a polypeptide that provides for methyltransferase activity, demethylase activity, acetyltransferase activity, deacetylase activity, kinase activity, phosphatase activity, ubiquitin ligase activity, deubiquitinating activity, adenylation activity, deadenylation activity, SUMOylating activity, deSUMOylating activity, ribosylation activity, deribosylation activity, myristoylation activity, or demyristoylation activity.

[0511] Additional suitable heterologous polypeptide include, but are not limited to, a polypeptide that directly provides for increased transcription and/or translation of a target nucleic acid (e.g., a transcription activator or a fragment thereof, a protein or fragment thereof that recruits a transcription activator, a small molecule/drug-responsive transcription and/or translation regulator, a translation-regulating protein, etc.).

[0512] Non-limiting examples of heterologous polypeptides to accomplish increased or decreased transcription include transcription activator and transcription repressor domains (e.g., the Kruppel associated box (KRAB or SKD); the Mad mSIN3 interaction domain (SID); the ERF repressor domain (ERD), etc.). In some such cases, a Cas9 fusion polypeptide is targeted by the guide nucleic acid (guide RNA) to a specific location (i.e., sequence) in the target nucleic acid and exerts locus-specific regulation such as blocking RNA polymerase binding to a promoter (which selectively inhibits transcription activator function), and/or modifying the local chromatin status (e.g., when a fusion sequence is used that modifies the target nucleic acid or modifies a polypeptide associated with the target nucleic acid). In some cases, the changes are transient (e.g., transcription repression or activation). In some cases, the changes are inheritable (e.g., when epigenetic modifications are made to the target nucleic acid or to proteins associated with the target nucleic acid, e.g., nucleosomal histones).

[0513] Non-limiting examples of heterologous polypeptides for use when targeting ssRNA target nucleic acids include (but are not limited to): splicing factors (e.g., RS domains); protein translation components (e.g., translation initiation, elongation, and/or release factors; e.g., eIF4G); RNA methylases; RNA editing enzymes (e.g., RNA deaminases, e.g., adenosine deaminase acting on RNA (ADAR), including A to I and/or C to U editing enzymes); helicases; RNA-binding proteins; and the like. It is understood that a heterologous polypeptide can include the entire protein or in some cases can include a fragment of the protein (e.g., a functional domain).

[0514] The heterologous polypeptide of a subject Cas9 fusion polypeptide can be any domain capable of interacting with ssRNA (which, for the purposes of this disclosure, includes intramolecular and/or intermolecular secondary structures, e.g., double-stranded RNA duplexes such as hairpins, stem-loops, etc.), whether transiently or irreversibly, directly or indirectly, including but not limited to an effector domain selected from the group comprising; Endonucleases (for example RNase III, the CRR22 DYW domain, Dicer, and PIN (PilT N-terminus) domains from proteins such as SMG5 and SMG6); proteins and protein domains responsible for stimulating RNA cleavage (for example CPSF, CstF, CFIm and CFIIm); Exonucleases (for example XRN-1 or Exonuclease T); Deadenylases (for example HNT3); proteins and protein domains responsible for nonsense mediated RNA decay (for example UPF1, UPF2, UPF3, UPF3b, RNP S1, Y14, DEK, REF2, and SRm160); proteins and protein domains responsible for stabilizing RNA (for example PABP); proteins and protein domains responsible for repressing translation (for example Ago2 and Ago4); proteins and protein domains responsible for stimulating translation (for example Staufen); proteins and protein domains responsible for (e.g., capable of) modulating translation (e.g., translation factors such as initiation factors, elongation factors, release factors, etc., e.g., eIF4G); proteins and protein domains responsible for polyadenylation of RNA (for example PAP1, GLD-2, and Star-PAP); proteins and protein domains responsible for polyuridinylation of RNA (for example CI D1 and terminal uridylate transferase); proteins and protein domains responsible for RNA localization (for example from IMP1, ZBP1, She2p, She3p, and Bicaudal-D); proteins and protein domains responsible for nuclear retention of RNA (for example Rrp6); proteins and protein domains responsible for nuclear export of RNA (for example TAP, NXF1, THO, TREX, REF, and Aly); proteins and protein domains responsible for repression of RNA splicing (for example PTB, Sam68, and hnRNP A1); proteins and protein domains responsible for stimulation of RNA splicing (for example Serine/Arginine-rich (SR) domains); proteins and protein domains responsible for reducing the efficiency of transcription (for example FUS (TLS)); and proteins and protein domains responsible for stimulating transcription (for example CDK7 and HIV Tat). Alternatively, the effector domain may be selected from the group comprising Endonucleases; proteins and protein domains capable of stimulating RNA cleavage; Exonucleases; Deadenylases; proteins and protein domains having nonsense mediated RNA decay activity; proteins and protein domains capable of stabilizing RNA; proteins and protein domains capable of repressing translation; proteins and protein domains capable of stimulating translation; proteins and protein domains capable of modulating translation (e.g., translation factors such as initiation factors, elongation factors, release factors, etc., e.g., eIF4G); proteins and protein domains capable of polyadenylation of RNA; proteins and protein domains capable of polyuridinylation of RNA; proteins and protein domains having RNA localization activity; proteins and protein domains capable of nuclear retention of RNA; proteins and protein domains having RNA nuclear export activity; proteins and protein domains capable of repression of RNA splicing; proteins and protein domains capable of stimulation of RNA splicing; proteins and protein domains capable of reducing the efficiency of transcription; and proteins and protein domains capable of stimulating transcription. Another suitable heterologous polypeptide is a PUF RNA-binding domain, which is described in more detail in WO2012068627.

[0515] Some RNA splicing factors that can be used (in whole or as fragments thereof) as heterologous polypeptides for a Cas9 fusion polypeptide have modular organization, with separate sequence-specific RNA binding modules and splicing effector domains. For example, members of the Serine/Arginine-rich (SR) protein family contain N-terminal RNA recognition motifs (RRMs) that bind to exonic splicing enhancers (ESEs) in pre-mRNAs and C-terminal RS domains that promote exon inclusion. As another example, the hnRNP protein hnRNP Al binds to exonic splicing silencers (ESSs) through its RRM domains and inhibits exon inclusion through a C-terminal Glycine-rich domain. Some splicing factors can regulate alternative use of splice site (ss) by binding to regulatory sequences between the two alternative sites. For example, ASF/SF2 can recognize ESEs and promote the use of intron proximal sites, whereas hnRNP A1 can bind to ESSs and shift splicing towards the use of intron distal sites. One application for such factors is to generate ESFs that modulate alternative splicing of endogenous genes, particularly disease associated genes. For example, Bcl-x pre-mRNA produces two splicing isoforms with two alternative 5′ splice sites to encode proteins of opposite functions. The long splicing isoform Bcl-xL is a potent apoptosis inhibitor expressed in long-lived postmitotic cells and is up-regulated in many cancer cells, protecting cells against apoptotic signals. The short isoform Bcl-xS is a pro-apoptotic isoform and expressed at high levels in cells with a high turnover rate (e.g., developing lymphocytes). The ratio of the two Bcl-x splicing isoforms is regulated by multiple c\acute{ω}-elements that are located in either the core exon region or the exon extension region (i.e., between the two alternative 5′ splice sites). For more examples, see WO2010075303.

### Linkers

[0516] In some embodiments, a subject Cas9 fusion polypeptide can include a Cas9 polypeptide that is linked to an internally inserted heterologous amino acid or heterologous polypeptide (a heterologous amino acid sequence) via a linker polypeptide (e.g., one or more linker polypeptides). The linker polypeptide may have any of a variety of amino acid sequences. Proteins can be joined by a spacer peptide, generally of a flexible nature, although other chemical linkages are not excluded. Suitable linkers include polypeptides of between 4 amino acids and 40 amino acids in length, or between 4 amino acids and 25 amino acids in length. These linkers are generally produced by using synthetic, linker-encoding oligonucleotides to couple the proteins. Peptide linkers with a degree of flexibility can be used. The linking peptides may have virtually any amino acid sequence, bearing in mind that the preferred linkers will have a sequence that results in a generally flexible peptide. The use of small amino acids, such as glycine and alanine, are of use in creating a flexible peptide. The creation of such sequences is routine to those of skill in the art. In some cases, a linker peptide is stiff; for example, prolines can be used to generate a stiff linker. For example, a peptide that includes a poly(Pro) stretch can be used to generate a stiff linker. As another example, a peptide that includes Pro-Pro-Ser-Ala can be used as a linker. A variety of different linkers are commercially available and are considered suitable for use.

[0517] Exemplary linker polypeptides include glycine polymers (G)ₙ, glycine-serine polymers (including, for example, (GS)ₙ, GSGGSₙ (SEQ ID NO: 817), GGSGGSₙ (SEQ ID NO: 818), and GGGSₙ (SEQ ID NO: 819), where n is an integer of at least one), glycine-alanine polymers, alanine-serine polymers. Exemplary linkers can comprise amino acid sequences including, but not limited to, GGSG (SEQ ID NO: 820), GGSGG (SEQ ID NO: 821), GSGSG (SEQ ID NO: 822), GSGGG (SEQ ID NO: 823), GGGSG (SEQ ID NO: 824), GSSSG (SEQ ID NO: 825), and the like. The ordinarily skilled artisan will recognize that design of a peptide conjugated to any elements described above can include linkers that are all or partially flexible, such that the linker can include a flexible linker as well as one or more portions that confer less flexible structure.

### Cas9 Guide RNA

[0518] A nucleic acid molecule that binds to a CRISPR/Cas protein (e.g., a Cas9 protein) and targets the complex to a specific location within a target nucleic acid is referred to herein as a “CRISPR/Cas guide nucleic acid” or “CRISPR/Cas guide RNA”. When the guide RNA is for a Cas9 protein, e.g., a Cas9 fusion polypeptide, it is referred to as a “Cas9 guide RNA.”

[0519] A Cas9 guide RNA can be said to include two segments, a first segment (referred to herein as a “targeting segment”); and a second segment (referred to herein as a “protein-binding segment”). By “segment” it is meant a segment/section/region of a molecule, e.g., a contiguous stretch of nucleotides in a nucleic acid molecule. A segment can also mean a region/section of a complex such that a segment may comprise regions of more than one molecule.

[0520] The first segment (targeting segment) of a Cas9 guide RNA includes a nucleotide sequence (a guide sequence) that is complementary to (and therefore hybridizes with) a specific sequence (a target site) within a target nucleic acid (e.g., a target ssRNA, a target ssDNA, the complementary strand of a double stranded target DNA, etc.). The protein-binding segment (or “protein-binding sequence”) interacts with (binds to) a Cas9 polypeptide. The protein-binding segment of a subject Cas9 guide RNA includes two complementary stretches of nucleotides that hybridize to one another to form a double stranded RNA duplex (dsRNA duplex). Site-specific binding and/or cleavage of a target nucleic acid (e.g., genomic DNA) can occur at locations (e.g., target sequence of a target locus) determined by base-pairing complementarity between the Cas9 guide RNA (the guide sequence of the Cas9 guide RNA) and the target nucleic acid.

[0521] A Cas9 guide RNA and a Cas9 protein, e.g., a fusion Cas9 polypeptide, form a complex (e.g., bind via non-covalent interactions). The Cas9 guide RNA provides target specificity to the complex by including a targeting segment, which includes a guide sequence (a nucleotide sequence that is complementary to a sequence of a target nucleic acid). The Cas9 protein of the complex provides the site-specific activity (e.g., cleavage activity or an activity provided by the Cas9 protein when the Cas9 protein is a Cas9 fusion polypeptide, i.e., has a fusion partner). In other words, the Cas9 protein is guided to a target nucleic acid sequence (e.g. a target sequence in a chromosomal nucleic acid, e.g., a chromosome; a target sequence in an extrachromosomal nucleic acid, e.g. an episomal nucleic acid, a minicircle, an ssRNA, an ssDNA, etc.; a target sequence in a mitochondrial nucleic acid; a target sequence in a chloroplast nucleic acid; a target sequence in a plasmid; a target sequence in a viral nucleic acid; etc.) by virtue of its association with the Cas9 guide RNA.

[0522] The “guide sequence” also referred to as the “targeting sequence” of a Cas9 guide RNA can be modified so that the Cas9 guide RNA can target a Cas9 protein, e.g., a fusion Cas9 polypeptide, to any desired sequence of any desired target nucleic acid, with the exception (e.g., as described herein) that the PAM sequence can be taken into account. Thus, for example, a Cas9 guide RNA can have a targeting segment with a sequence that has complementarity with (e.g., can hybridize to) a sequence in a nucleic acid in a eukaryotic cell, e.g., a viral nucleic acid, a eukaryotic nucleic acid (e.g., a eukaryotic chromosome, chromosomal sequence, a eukaryotic RNA, etc.), and the like.

[0523] In some embodiments, a subject Cas9 guide RNA includes two separate nucleic acid molecules: an “activator” and a “targeter” and is referred to herein as a “dual Cas9 guide RNA”, a “double-molecule Cas9 guide RNA”, or a “two-molecule Cas9 guide RNA” a “dual guide RNA”, or a “dgRNA.” In some embodiments, the activator and targeter are covalently linked to one another (e.g., via intervening nucleotides) and the guide RNA is referred to as a “single guide RNA”, a “Cas9 single guide RNA”, a “single-molecule Cas9 guide RNA,” or a “one-molecule Cas9 guide RNA”, or simply “sgRNA.”

[0524] A Cas9 guide RNA comprises a crRNA-like (“CRISPR RNA”/“targeter”/“crRNA”/“crRNA repeat”) molecule and a corresponding tracrRNA-like (“trans-acting CRISPR RNA”/“activator”/“tracrRNA”) molecule. A crRNA-like molecule (targeter) comprises both the targeting segment (single stranded) of the Cas9 guide RNA and a stretch (“duplex-forming segment”) of nucleotides that forms one half of the dsRNA duplex of the protein-binding segment of the Cas9 guide RNA. A corresponding tracrRNA-like molecule (activator/tracrRNA) comprises a stretch of nucleotides (duplex-forming segment) that forms the other half of the dsRNA duplex of the protein-binding segment of the guide nucleic acid. In other words, a stretch of nucleotides of a crRNA-like molecule are complementary to and hybridize with a stretch of nucleotides of a tracrRNA-like molecule to form the dsRNA duplex of the protein-binding domain of the Cas9 guide RNA. As such, each targeter molecule can be said to have a corresponding activator molecule (which has a region that hybridizes with the targeter). The targeter molecule additionally provides the targeting segment. Thus, a targeter and an activator molecule (as a corresponding pair) hybridize to form a Cas9 guide RNA. The exact sequence of a given crRNA or tracrRNA molecule is characteristic of the species in which the RNA molecules are found. A subject dual Cas9 guide RNA can include any corresponding activator and targeter pair.

[0525] The term “activator” or “activator RNA” is used herein to mean a tracrRNA-like molecule (tracrRNA: “trans-acting CRISPR RNA”) of a Cas9 dual guide RNA (and therefore of a Cas9 single guide RNA when the “activator” and the “targeter” are linked together by, e.g., intervening nucleotides). Thus, for example, a Cas9 guide RNA (dgRNA or sgRNA) comprises an activator sequence (e.g., a tracrRNA sequence). A tracr molecule (a tracrRNA) is a naturally existing molecule that hybridizes with a CRISPR RNA molecule (a crRNA) to form a Cas9 dual guide RNA. The term “activator” is used herein to encompass naturally existing tracrRNAs, but also to encompass tracrRNAs with modifications (e.g., truncations, sequence variations, base modifications, backbone modifications, linkage modifications, etc.) where the activator retains at least one function of a tracrRNA (e.g., contributes to the dsRNA duplex to which Cas9 protein binds). In some cases the activator provides one or more stem loops that can interact with Cas9 protein. An activator can be referred to as having a tracr sequence (tracrRNA sequence) and in some cases is a tracrRNA, but the term “activator” is not limited to naturally existing tracrRNAs.

[0526] The term “targeter” or “targeter RNA” is used herein to refer to a crRNA-like molecule (crRNA: “CRISPR RNA”) of a Cas9 dual guide RNA (and therefore of a Cas9 single guide RNA when the “activator” and the “targeter” are linked together, e.g., by intervening nucleotides). Thus, for example, a Cas9 guide RNA (dgRNA or sgRNA) comprises a targeting segment (which includes nucleotides that hybridize with (are complementary to) a target nucleic acid, and a duplex-forming segment (e.g., a duplex forming segment of a crRNA, which can also be referred to as a crRNA repeat). Because the sequence of a targeting segment (the segment that hybridizes with a target sequence of a target nucleic acid) of a targeter is modified by a user to hybridize with a desired target nucleic acid, the sequence of a targeter will often be a non-naturally occurring sequence. However, the duplex-forming segment of a targeter (described in more detail below), which hybridizes with the duplex-forming segment of an activator, can include a naturally existing sequence (e.g., can include the sequence of a duplex-forming segment of a naturally existing crRNA, which can also be referred to as a crRNA repeat). Thus, the term targeter is used herein to distinguish from naturally occurring crRNAs, despite the fact that part of a targeter (e.g., the duplex-forming segment) often includes a naturally occurring sequence from a crRNA. However, the term “targeter” encompasses naturally occurring crRNAs.

[0527] A Cas9 guide RNA can also be said to include 3 parts: (i) a targeting sequence (a nucleotide sequence that hybridizes with a sequence of the target nucleic acid); (ii) an activator sequence (as described above)(in some cases, referred to as a tracr sequence); and (iii) a sequence that hybridizes to at least a portion of the activator sequence to form a double stranded duplex. A targeter has (i) and (iii); while an activator has (ii).

[0528] A Cas9 guide RNA (e.g. a dual guide RNA or a single guide RNA) can be comprised of any corresponding activator and targeter pair. In some cases, the duplex forming segments can be swapped between the activator and the targeter. In other words, in some cases, the targeter includes a sequence of nucleotides from a duplex forming segment of a tracrRNA (which sequence would normally be part of an activator) while the activator includes a sequence of nucleotides from a duplex forming segment of a crRNA (which sequence would normally be part of a targeter).

[0529] As noted above, a targeter comprises both the targeting segment (single stranded) of the Cas9 guide RNA and a stretch (“duplex-forming segment”) of nucleotides that forms one half of the dsRNA duplex of the protein-binding segment of the Cas9 guide RNA. A corresponding tracrRNA-like molecule (activator) comprises a stretch of nucleotides (a duplex-forming segment) that forms the other half of the dsRNA duplex of the protein-binding segment of the Cas9 guide RNA. In other words, a stretch of nucleotides of the targeter is complementary to and hybridizes with a stretch of nucleotides of the activator to form the dsRNA duplex of the protein-binding segment of a Cas9 guide RNA. As such, each targeter can be said to have a corresponding activator (which has a region that hybridizes with the targeter). The targeter molecule additionally provides the targeting segment. Thus, a targeter and an activator (as a corresponding pair) hybridize to form a Cas9 guide RNA. The particular sequence of a given naturally existing crRNA or tracrRNA molecule is characteristic of the species in which the RNA molecules are found. Examples of suitable activator and targeter are well known in the art.

[0530] A Cas9 guide RNA (e.g. a dual guide RNA or a single guide RNA) can be comprised of any corresponding activator and targeter pair. Non-limiting examples of nucleotide sequences that can be included in a Cas9 guide RNA (dgRNA or sgRNA) include sequences set forth in SEQ ID NOs: 827-1075, or complements thereof. For example, in some cases, sequences from SEQ ID NOs: 827-957 (which are from tracrRNAs) or complements thereof, can pair with sequences from SEQ ID NOs: 962-1075 (which are from crRNAs), or complements thereof, to form a dsRNA duplex of a protein binding segment.

### Targeting Segment of a Cas9 Guide RNA

[0531] The first segment of a subject guide nucleic acid includes a guide sequence (i.e., a targeting sequence) (a nucleotide sequence that is complementary to a sequence (a target site) in a target nucleic acid). In other words, the targeting segment of a subject guide nucleic acid can interact with a target nucleic acid (e.g., double stranded DNA (dsDNA)) in a sequence-specific manner via hybridization (i.e., base pairing). As such, the nucleotide sequence of the targeting segment may vary (depending on the target) and can determine the location within the target nucleic acid that the Cas9 guide RNA and the target nucleic acid will interact. The targeting segment of a Cas9 guide RNA can be modified (e.g., by genetic engineering)/designed to hybridize to any desired sequence (target site) within a target nucleic acid (e.g., a eukaryotic target nucleic acid such as genomic DNA).

[0532] The targeting segment can have a length of 7 or more nucleotides (nt) (e.g., 8 or more, 9 or more, 10 or more, 12 or more, 15 or more, 20 or more, 25 or more, 30 or more, or 40 or more nucleotides). In some cases, the targeting segment can have a length of from 7 to 100 nucleotides (nt) (e.g., from 7 to 80 nt, from 7 to 60 nt, from 7 to 40 nt, from 7 to 30 nt, from 7 to 25 nt, from 7 to 22 nt, from 7 to 20 nt, from 7 to 18 nt, from 8 to 80 nt, from 8 to 60 nt, from 8 to 40 nt, from 8 to 30 nt, from 8 to 25 nt, from 8 to 22 nt, from 8 to 20 nt, from 8 to 18 nt, from 10 to 100 nt, from 10 to 80 nt, from 10 to 60 nt, from 10 to 40 nt, from 10 to 30 nt, from 10 to 25 nt, from 10 to 22 nt, from 10 to 20 nt, from 10 to 18 nt, from 12 to 100 nt, from 12 to 80 nt, from 12 to 60 nt, from 12 to 40 nt, from 12 to 30 nt, from 12 to 25 nt, from 12 to 22 nt, from 12 to 20 nt, from 12 to 18 nt, from 14 to 100 nt, from 14 to 80 nt, from 14 to 60 nt, from 14 to 40 nt, from 14 to 30 nt, from 14 to 25 nt, from 14 to 22 nt, from 14 to 20 nt, from 14 to 18 nt, from 16 to 100 nt, from 16 to 80 nt, from 16 to 60 nt, from 16 to 40 nt, from 16 to 30 nt, from 16 to 25 nt, from 16 to 22 nt, from 16 to 20 nt, from 16 to 18 nt, from 18 to 100 nt, from 18 to 80 nt, from 18 to 60 nt, from 18 to 40 nt, from 18 to 30 nt, from 18 to 25 nt, from 18 to 22 nt, or from 18 to 20 nt).

[0533] The nucleotide sequence (the targeting sequence) of the targeting segment that is complementary to a nucleotide sequence (target site) of the target nucleic acid can have a length of 10 nt or more. For example, the targeting sequence of the targeting segment that is complementary to a target site of the target nucleic acid can have a length of 12 nt or more, 15 nt or more, 18 nt or more, 19 nt or more, or 20 nt or more. In some cases, the nucleotide sequence (the targeting sequence) of the targeting segment that is complementary to a nucleotide sequence (target site) of the target nucleic acid has a length of 12 nt or more. In some cases, the nucleotide sequence (the targeting sequence) of the targeting segment that is complementary to a nucleotide sequence (target site) of the target nucleic acid has a length of 18 nt or more.

[0534] For example, the targeting sequence of the targeting segment that is complementary to a target sequence of the target nucleic acid can have a length of from 10 to 100 nucleotides (nt) (e.g., from 10 to 90 nt, from 10 to 75 nt, from 10 to 60 nt, from 10 to 50 nt, from 10 to 35 nt, from 10 to 30 nt, from 10 to 25 nt, from 10 to 22 nt, from 10 to 20 nt, from 12 to 100 nt, from 12 to 90 nt, from 12 to 75 nt, from 12 to 60 nt, from 12 to 50 nt, from 12 to 35 nt, from 12 to 30 nt, from 12 to 25 nt, from 12 to 22 nt, from 12 to 20 nt, from 15 to 100 nt, from 15 to 90 nt, from 15 to 75 nt, from 15 to 60 nt, from 15 to 50 nt, from 15 to 35 nt, from 15 to 30 nt, from 15 to 25 nt, from 15 to 22 nt, from 15 to 20 nt, from 17 to 100 nt, from 17 to 90 nt, from 17 to 75 nt, from 17 to 60 nt, from 17 to 50 nt, from 17 to 35 nt, from 17 to 30 nt, from 17 to 25 nt, from 17 to 22 nt, from 17 to 20 nt, from 18 to 100 nt, from 18 to 90 nt, from 18 to 75 nt, from 18 to 60 nt, from 18 to 50 nt, from 18 to 35 nt, from 18 to 30 nt, from 18 to 25 nt, from 18 to 22 nt, or from 18 to 20 nt). In some cases, the targeting sequence of the targeting segment that is complementary to a target sequence of the target nucleic acid has a length of from 15 nt to 30 nt. In some cases, the targeting sequence of the targeting segment that is complementary to a target sequence of the target nucleic acid has a length of from 15 nt to 25 nt. In some cases, the targeting sequence of the targeting segment that is complementary to a target sequence of the target nucleic acid has a length of from 18 nt to 30 nt. In some cases, the targeting sequence of the targeting segment that is complementary to a target sequence of the target nucleic acid has a length of from 18 nt to 25 nt. In some cases, the targeting sequence of the targeting segment that is complementary to a target sequence of the target nucleic acid has a length of from 18 nt to 22 nt. In some cases, the targeting sequence of the targeting segment that is complementary to a target site of the target nucleic acid is 20 nucleotides in length. In some cases, the targeting sequence of the targeting segment that is complementary to a target site of the target nucleic acid is 19 nucleotides in length.

[0535] The percent complementarity between the targeting sequence (guide sequence) of the targeting segment and the target site of the target nucleic acid can be 60% or more (e.g., 65% or more, 70% or more, 75% or more, 80% or more, 85% or more, 90% or more, 95% or more, 97% or more, 98% or more, 99% or more, or 100%). In some cases, the percent complementarity between the targeting sequence of the targeting segment and the target site of the target nucleic acid is 100% over the seven contiguous 5′-most nucleotides of the target site of the target nucleic acid. In some cases, the percent complementarity between the targeting sequence of the targeting segment and the target site of the target nucleic acid is 60% or more over about 20 contiguous nucleotides. In some cases, the percent complementarity between the targeting sequence of the targeting segment and the target site of the target nucleic acid is 100% over the fourteen contiguous 5′-most nucleotides of the target site of the target nucleic acid and as low as 0% or more over the remainder. In such a case, the targeting sequence can be considered to be 14 nucleotides in length. In some cases, the percent complementarity between the targeting sequence of the targeting segment and the target site of the target nucleic acid is 100% over the seven contiguous 5′-most nucleotides of the target site of the target nucleic acid and as low as 0% or more over the remainder. In such a case, the targeting sequence can be considered to be 20 nucleotides in length.

[0536] In some cases, the percent complementarity between the targeting sequence of the targeting segment and the target site of the target nucleic acid is 100% over the 7 contiguous 5′-most nucleotides of the target site of the target nucleic acid (which can be complementary to the 3′-most nucleotides of the targeting sequence of the Cas9 guide RNA). In some cases, the percent complementarity between the targeting sequence of the targeting segment and the target site of the target nucleic acid is 100% over the 8 contiguous 5′-most nucleotides of the target site of the target nucleic acid (which can be complementary to the 3′-most nucleotides of the targeting sequence of the Cas9 guide RNA). In some cases, the percent complementarity between the targeting sequence of the targeting segment and the target site of the target nucleic acid is 100% over the 9 contiguous 5′-most nucleotides of the target site of the target nucleic acid (which can be complementary to the 3′-most nucleotides of the targeting sequence of the Cas9 guide RNA). In some cases, the percent complementarity between the targeting sequence of the targeting segment and the target site of the target nucleic acid is 100% over the 10 contiguous 5′-most nucleotides of the target site of the target nucleic acid (which can be complementary to the 3′-most nucleotides of the targeting sequence of the Cas9 guide RNA). In some cases, the percent complementarity between the targeting sequence of the targeting segment and the target site of the target nucleic acid is 100% over the 17 contiguous 5′-most nucleotides of the target site of the target nucleic acid (which can be complementary to the 3′-most nucleotides of the targeting sequence of the Cas9 guide RNA). In some cases, the percent complementarity between the targeting sequence of the targeting segment and the target site of the target nucleic acid is 100% over the 18 contiguous 5′-most nucleotides of the target site of the target nucleic acid (which can be complementary to the 3′-most nucleotides of the targeting sequence of the Cas9 guide RNA). In some cases, the percent complementarity between the targeting sequence of the targeting segment and the target site of the target nucleic acid is 60% or more (e.g., e.g., 65% or more, 70% or more, 75% or more, 80% or more, 85% or more, 90% or more, 95% or more, 97% or more, 98% or more, 99% or more, or 100%) over about 20 contiguous nucleotides.

[0537] In some cases, the percent complementarity between the targeting sequence of the targeting segment and the target site of the target nucleic acid is 100% over the 7 contiguous 5′-most nucleotides of the target site of the target nucleic acid and as low as 0% or more over the remainder. In such a case, the targeting sequence can be considered to be 7 nucleotides in length. In some cases, the percent complementarity between the targeting sequence of the targeting segment and the target site of the target nucleic acid is 100% over the 8 contiguous 5′-most nucleotides of the target site of the target nucleic acid and as low as 0% or more over the remainder. In such a case, the targeting sequence can be considered to be 8 nucleotides in length. In some cases, the percent complementarity between the targeting sequence of the targeting segment and the target site of the target nucleic acid is 100% over the 9 contiguous 5′-most nucleotides of the target site of the target nucleic acid and as low as 0% or more over the remainder. In such a case, the targeting sequence can be considered to be 9 nucleotides in length. In some cases, the percent complementarity between the targeting sequence of the targeting segment and the target site of the target nucleic acid is 100% over the 10 contiguous 5′-most nucleotides of the target site of the target nucleic acid and as low as 0% or more over the remainder. In such a case, the targeting sequence can be considered to be 10 nucleotides in length. In some cases, the percent complementarity between the targeting sequence of the targeting segment and the target site of the target nucleic acid is 100% over the 11 contiguous 5′-most nucleotides of the target site of the target nucleic acid and as low as 0% or more over the remainder. In such a case, the targeting sequence can be considered to be 11 nucleotides in length. In some cases, the percent complementarity between the targeting sequence of the targeting segment and the target site of the target nucleic acid is 100% over the 12 contiguous 5′-most nucleotides of the target site of the target nucleic acid and as low as 0% or more over the remainder. In such a case, the targeting sequence can be considered to be 12 nucleotides in length. In some cases, the percent complementarity between the targeting sequence of the targeting segment and the target site of the target nucleic acid is 100% over the 13 contiguous 5′-most nucleotides of the target site of the target nucleic acid and as low as 0% or more over the remainder. In such a case, the targeting sequence can be considered to be 13 nucleotides in length. In some cases, the percent complementarity between the targeting sequence of the targeting segment and the target site of the target nucleic acid is 100% over the 14 contiguous 5′-most nucleotides of the target site of the target nucleic acid and as low as 0% or more over the remainder. In such a case, the targeting sequence can be considered to be 14 nucleotides in length. In some cases, the percent complementarity between the targeting sequence of the targeting segment and the target site of the target nucleic acid is 100% over the 17 contiguous 5′-most nucleotides of the target site of the target nucleic acid and as low as 0% or more over the remainder. In such a case, the targeting sequence can be considered to be 17 nucleotides in length. In some cases, the percent complementarity between the targeting sequence of the targeting segment and the target site of the target nucleic acid is 100% over the 18 contiguous 5′-most nucleotides of the target site of the target nucleic acid and as low as 0% or more over the remainder. In such a case, the targeting sequence can be considered to be 18 nucleotides in length.

[0538] Examples of various Cas9 guide RNAs can be found in the art, for example, see Jinek et al., Science. 2012 Aug. 17; 337(6096):816-21; Chylinski et al., RNA Biol. 2013 May; 10(5):726-37; Ma et al., Biomed Res Int. 2013; 2013:270805; Hou et al., Proc Natl Acad Sci USA. 2013 Sep. 24; 110(39):15644-9; Jinek et al., Elife. 2013; 2:e00471; Pattanayak et al., Nat Biotechnol. 2013 September; 31(9):839-43; Qi et al, Cell. 2013 Feb. 28; 152(5):1173-83; Wang et al., Cell. 2013 May 9; 153(4):910-8; Auer et al., Genome Res. 2013 Oct. 31; Chen et al., Nucleic Acids Res. 2013 Nov. 1; 41(20):e19; Cheng et al., Cell Res. 2013 October; 23(10):1163-71; Cho et al., Genetics. 2013 November; 195(3):1177-80; DiCarlo et al., Nucleic Acids Res. 2013 April; 41(7):4336-43; Dickinson et al., Nat Methods. 2013 October; 10(10):1028-34; Ebina et al., Sci Rep. 2013; 3:2510; Fujii et. al, Nucleic Acids Res. 2013 Nov. 1; 41(20):e187; Hu et al., Cell Res. 2013 November; 23(11):1322-5; Jiang et al., Nucleic Acids Res. 2013 Nov. 1; 41(20):e188; Larson et al., Nat Protoc. 2013 November; 8(11):2180-96; Mali et. at., Nat Methods. 2013 October; 10(10):957-63; Nakayama et al., Genesis. 2013 December; 51(12):835-43; Ran et al., Nat Protoc. 2013 November; 8(11):2281-308; Ran et al., Cell. 2013 Sep. 12; 154(6):1380-9; Upadhyay et al., G3 (Bethesda). 2013 Dec. 9; 3(12):2233-8; Walsh et al., Proc Natl Acad Sci USA. 2013 Sep. 24; 110(39):15514-5; Xie et al., Mol Plant. 2013 Oct. 9; Yang et al., Cell. 2013 Sep. 12; 154(6):1370-9; Briner et al., Mol Cell. 2014 Oct. 23; 56(2):333-9; and U.S. patents and patent applications: U.S. Pat. Nos. 8,906,616; 8,895,308; 8,889,418; 8,889,356; 8,871,445; 8,865,406; 8,795,965; 8,771,945; 8,697,359; 20140068797; 20140170753; 20140179006; 20140179770; 20140186843; 20140186919; 20140186958; 20140189896; 20140227787; 20140234972; 20140242664; 20140242699; 20140242700; 20140242702; 20140248702; 20140256046; 20140273037; 20140273226; 20140273230; 20140273231; 20140273232; 20140273233; 20140273234; 20140273235; 20140287938; 20140295556; 20140295557; 20140298547; 20140304853; 20140309487; 20140310828; 20140310830; 20140315985; 20140335063; 20140335620; 20140342456; 20140342457; 20140342458; 20140349400; 20140349405; 20140356867; 20140356956; 20140356958; 20140356959; 20140357523; 20140357530; 20140364333; and 20140377868; all of which are hereby incorporated by reference in their entirety.

### Nucleic Acids

[0539] The present disclosure provides a nucleic acid comprising a nucleotide sequence encoding a fusion Cas9 polypeptide of the present disclosure. The present disclosure provides a nucleic acid/protein complex comprising: a) a fusion Cas9 polypeptide of the present disclosure; and b) a guide RNA.

[0540] The present disclosure provides compositions and methods that include a viral expression vector that includes, on the same DNA molecule: (i) a donor template sequence (having homology to a target locus of a target genome), and (ii) a nucleotide sequence that encodes a Cas9 guide RNA that hybridizes to a target sequence of the target locus of the targeted genome. Subject compositions and methods can also include a Cas9 fusion polypeptide of the present disclosure, or a nucleic acid encoding the Cas9 fusion polypeptide of the present disclosure (e.g., DNA or RNA, e.g., an mRNA). In some cases, the Cas9 fusion polypeptide is provided as a protein (e.g., not encoded by a nucleic acid). In some cases, the Cas9 fusion polypeptide is provided as an mRNA. In some cases, the Cas9 fusion polypeptide is provided as a DNA encoding the Cas9 fusion polypeptide, e.g., as part of a recombinant expression vector (e.g., a plasmid, a viral expression vector, e.g., a different viral expression vector than that which includes the donor template sequence and the Cas9 guide RNA).

[0541] In some embodiments, a subject method involves introducing into a cell (or a population of cells) (1) a viral expression vector that includes, on the same DNA molecule: (i) a donor template sequence (having homology to a target locus of a target genome), and (ii) a nucleotide sequence (operably linked to a promoter operable in a cell, e.g., a eukaryotic cell) that encodes a Cas9 guide RNA that hybridizes to a target sequence of the target locus of the targeted genome; and (2) a Cas9 fusion polypeptide of the present disclosure (or a nucleic acid comprising a nucleotide sequence encoding a Cas9 fusion polypeptide of the present disclosure). In some embodiments the targeted cell is in vitro and/or ex vivo. In some embodiments the targeted cell is in vivo.

[0542] Suitable expression vectors include viral expression vectors (e.g. viral vectors based on vaccinia virus; poliovirus; adenovirus (see, e.g., Li et al., Invest Opthalmol Vis Sci 35:2543 2549, 1994; Borras et al., Gene Ther 6:515 524, 1999; Li and Davidson, PNAS 92:7700 7704, 1995; Sakamoto et al., H Gene Ther 5:1088 1097, 1999; WO 94/12649, WO 93/03769; WO 93/19191; WO 94/28938; WO 95/11984 and WO 95/00655); adeno-associated virus (see, e.g., Ali et al., Hum Gene Ther 9:81 86, 1998, Flannery et al., PNAS 94:6916 6921, 1997; Bennett et al., Invest Opthalmol Vis Sci 38:2857 2863, 1997; Jomary et al., Gene Ther 4:683 690, 1997, Rolling et al., Hum Gene Ther 10:641 648, 1999; Ali et al., Hum Mol Genet 5:591 594, 1996; Srivastava in WO 93/09239, Samulski et al., J. Vir. (1989) 63:3822-3828; Mendelson et al., Virol. (1988) 166:154-165; and Flotte et al., PNAS (1993) 90:10613-10617); SV40; herpes simplex virus; human immunodeficiency virus (see, e.g., Miyoshi et al., PNAS 94:10319 23, 1997; Takahashi et al., J Virol 73:7812 7816, 1999); a retroviral vector (e.g., Murine Leukemia Virus, spleen necrosis virus, and vectors derived from retroviruses such as Rous Sarcoma Virus, Harvey Sarcoma Virus, avian leukosis virus, a lentivirus, human immunodeficiency virus, myeloproliferative sarcoma virus, and mammary tumor virus); and the like.

[0543] Depending on the host/vector system utilized, any of a number of suitable transcription and translation control elements, including constitutive and inducible promoters, transcription enhancer elements, transcription terminators, etc. may be used in the expression vector.

[0544] In some embodiments, a nucleotide sequence encoding a Cas9 guide RNA is operably linked to a control element, e.g., a transcriptional control element, such as a promoter. In some embodiments, a nucleotide sequence encoding a Cas9 protein (e.g., a Cas9 fusion polypeptide comprising: a wild type Cas9 protein; a variant Cas9 protein, etc.) is operably linked to a control element, e.g., a transcriptional control element, such as a promoter.

[0545] The transcriptional control element can be functional in the targeted HSC (e.g., mobilized peripheral blood (mPB) CD34(+) cell, bone marrow (BM) CD34(+) cell, etc.)

[0546] Non-limiting examples of eukaryotic promoters (promoters functional in a eukaryotic cell) include those from cytomegalovirus (CMV) immediate early, herpes simplex virus (HSV) thymidine kinase, early and late SV40, long terminal repeats (LTRs) from retrovirus, and mouse metallothionein-I. Selection of the appropriate vector and promoter is well within the level of ordinary skill in the art. The expression vector may also contain a ribosome binding site for translation initiation and a transcription terminator. The expression vector may also include appropriate sequences for amplifying expression. The expression vector may also include nucleotide sequences encoding protein tags (e.g., 6×His tag, hemagglutinin tag, green fluorescent protein, etc.) that can be fused to the Cas9 fusion protein, thus resulting in a chimeric polypeptide.

[0547] In some embodiments, a nucleotide sequence encoding a Cas9 guide RNA and/or a Cas9 fusion polypeptide is operably linked to an inducible promoter. In some embodiments, a nucleotide sequence encoding a Cas9 guide RNA and/or a Cas9 fusion protein is operably linked to a constitutive promoter.

[0548] A promoter can be a constitutively active promoter (i.e., a promoter that is constitutively in an active/“ON” state), it may be an inducible promoter (i.e., a promoter whose state, active/“ON” or inactive/“OFF”, is controlled by an external stimulus, e.g., the presence of a particular temperature, compound, or protein), it may be a spatially restricted promoter (i.e., transcriptional control element, enhancer, etc.)(e.g., tissue specific promoter, cell type specific promoter, etc.), and it may be a temporally restricted promoter (i.e., the promoter is in the “ON” state or “OFF” state during specific stages of embryonic development or during specific stages of a biological process, e.g., hair follicle cycle in mice).

[0549] Suitable promoters can be derived from viruses and can therefore be referred to as viral promoters, or they can be derived from any organism, including prokaryotic or eukaryotic organisms. Suitable promoters can be used to drive expression by any RNA polymerase (e.g., pol I, pol II, pol III). Exemplary promoters include, but are not limited to the SV40 early promoter, mouse mammary tumor virus long terminal repeat (LTR) promoter; adenovirus major late promoter (Ad MLP); a herpes simplex virus (HSV) promoter, a cytomegalovirus (CMV) promoter such as the CMV immediate early promoter region (CMVIE), a rous sarcoma virus (RSV) promoter, a human U6 small nuclear promoter (U6) (Miyagishi et al., Nature Biotechnology 20, 497-500 (2002)), an enhanced U6 promoter (e.g., Xia et al., Nucleic Acids Res. 2003 Sep. 1; 31(17)), a human H1 promoter (H1), and the like.

[0550] Examples of inducible promoters include, but are not limited to T7 RNA polymerase promoter, T3 RNA polymerase promoter, Isopropyl-beta-D-thiogalactopyranoside (IPTG)-regulated promoter, lactose induced promoter, heat shock promoter, Tetracycline-regulated promoter, Steroid-regulated promoter, Metal-regulated promoter, estrogen receptor-regulated promoter, etc. Inducible promoters can therefore be regulated by molecules including, but not limited to, doxycycline; RNA polymerase, e.g., T7 RNA polymerase; an estrogen receptor; an estrogen receptor fusion; etc.

[0551] In some embodiments, the promoter is a spatially restricted promoter (i.e., cell type specific promoter, tissue specific promoter, etc.) such that in a multi-cellular organism, the promoter is active (i.e., “ON”) in a subset of specific cells. Spatially restricted promoters may also be referred to as enhancers, transcriptional control elements, control sequences, etc. Any convenient spatially restricted promoter may be used as long as the promoter is functional in the targeted host cell (e.g., eukaryotic cell; prokaryotic cell).

[0552] Methods of introducing a nucleic acid into a host cell are known in the art, and any known method can be used to introduce a nucleic acid (e.g., an expression construct) into a cell. Suitable methods include e.g., viral infection, transfection, lipofection, electroporation, calcium phosphate precipitation, polyethyleneimine (PEI)-mediated transfection, DEAE-dextran mediated transfection, liposome-mediated transfection, particle gun technology, calcium phosphate precipitation, direct micro injection, nanoparticle-mediated nucleic acid delivery (see, e.g., Panyam et., al Adv Drug Deliv Rev. 2012 Sep. 13. pii: S0169-409X(12)00283-9. doi: 10.1016/j.addr.2012.09.023), and the like.

[0553] Introducing the viral expression vector into cells (along with a subject Cas9 fusion protein or nucleic acid encoding the protein) can occur in any culture media and under any culture conditions that promote the survival of the cells.

[0554] In some embodiments, a nucleotide sequence encoding a Cas9 protein, e.g. a subject Cas9 fusion polypeptide, can be codon optimized. In some cases, a codon optimized nucleotide sequence encoding a Cas9 fusion protein includes a sequence encoding a wildtype Cas9 protein or a variant Cas9 protein. Codon optimization is known in the art and entails the mutation of foreign-derived DNA to mimic the codon preferences of the intended host organism or host cell while encoding the same protein. Thus, the codons are changed, but the encoded protein remains unchanged. For example, if the intended target and/or host cell was a human cell, a subject Cas9 fusion protein, encoded by a human codon optimized nucleotide sequence would be a suitable Cas9 protein. As another non-limiting example, if the intended target and/or host cell was a mouse cell, a Cas9 protein encoded by a mouse codon optimized nucleotide sequence would be a suitable Cas9 protein. While codon optimization is not required, it is acceptable and may be preferable in certain cases.

[0555] In some embodiments, a Cas9 protein can be provided as RNA. The RNA can be provided by direct chemical synthesis or may be transcribed in vitro from a DNA (e.g., encoding the Cas9 protein). Once synthesized, the RNA may be introduced into a cell by any of the well-known techniques for introducing nucleic acids into cells (e.g., microinjection, electroporation, transfection, etc.).

[0556] Nucleic acids may be provided to the cells using well-developed transfection techniques; see, e.g. Angel and Yanik (2010) PLoS ONE 5(7): el 1756, and the commercially available TransMessenger® reagents from Qiagen, Stemfect™ RNA Transfection Kit from Stemgent, and TranslT®-mRNA Transfection Kit from Mirus Bio LLC. See also Beumer et al. (2008) Efficient gene targeting in Drosophila by direct embryo injection with zinc-finger nucleases. PNAS 105(50):19821-19826.

[0557] Vectors may be provided directly to the subject cells. In other words, the cells are contacted with vectors comprising the subject nucleic acids (e.g., viral expression vectors having the donor template sequence and encoding the Cas9 guide RNA; encoding the Cas9 protein) such that the vectors are taken up by the cells. Methods for contacting cells with nucleic acid vectors that are plasmids, include electroporation, calcium chloride transfection, microinjection, and lipofection are well known in the art. For viral vector delivery, cells can be contacted with viral particles comprising the subject viral expression vectors.

[0558] Retroviruses, for example, lentiviruses, are suitable for use in methods of the present disclosure. Commonly used retroviral vectors are “defective”, i.e. unable to produce viral proteins required for productive infection. Rather, replication of the vector requires growth in a packaging cell line. To generate viral particles comprising nucleic acids of interest, the retroviral nucleic acids comprising the nucleic acid are packaged into viral capsids by a packaging cell line. Different packaging cell lines provide a different envelope protein (ecotropic, amphotropic or xenotropic) to be incorporated into the capsid, this envelope protein determining the specificity of the viral particle for the cells (ecotropic for murine and rat; amphotropic for most mammalian cell types including human, dog and mouse; and xenotropic for most mammalian cell types except murine cells). The appropriate packaging cell line may be used to ensure that the cells are targeted by the packaged viral particles. Methods of introducing subject vector expression vectors into packaging cell lines and of collecting the viral particles that are generated by the packaging lines are well known in the art. Nucleic acids can also introduced by direct micro-injection (e.g., injection of RNA).

[0559] Vectors used for providing the nucleic acids encoding Cas9 guide RNA and/or a Cas9 fusion protein to HSCs can include suitable promoters for driving the expression, that is, transcriptional activation, of the nucleic acid of interest. In other words, the nucleic acid of interest will be operably linked to a promoter. This may include ubiquitously acting promoters, for example, the CMV-O-actin promoter, or inducible promoters, such as promoters that are active in particular cell populations or that respond to the presence of drugs such as tetracycline. By transcriptional activation, it is intended that transcription will be increased above basal levels in the target cell by 10 fold, by 100 fold, more usually by 1000 fold. In addition, vectors used for providing a nucleic acid encoding a Cas9 guide RNA and/or a Cas9 protein to the subject cells may include nucleic acid sequences that encode for selectable markers in the target cells, so as to identify cells that have taken up the Cas9 guide RNA and/or Cas9 protein.

[0560] A Cas9 fusion protein can be introduced into cells as RNA. Methods of introducing RNA into cells are known in the art and may include, for example, direct injection, transfection, or any other method used for the introduction of DNA. A Cas9 fusion protein may instead be provided to cells as a polypeptide. Such a polypeptide may optionally be fused to a polypeptide domain that increases solubility of the product. The domain may be linked to the polypeptide through a defined protease cleavage site, e.g. a TEV sequence, which is cleaved by TEV protease. The linker may also include one or more flexible sequences, e.g. from 1 to 10 glycine residues. In some embodiments, the cleavage of the fusion protein is performed in a buffer that maintains solubility of the product, e.g. in the presence of from 0.5 to 2 M urea, in the presence of polypeptides and/or polynucleotides that increase solubility, and the like. Domains of interest include endosomolytic domains, e.g. influenza HA domain; and other polypeptides that aid in production, e.g. IF2 domain, GST domain, GRPE domain, and the like. The polypeptide may be formulated for improved stability. For example, the peptides may be PEGylated, where the polyethyleneoxy group provides for enhanced lifetime in the blood stream.

[0561] Additionally or alternatively, the Cas9 fusion polypeptide may be fused to a polypeptide permeant domain to promote uptake by the cell. A number of permeant domains are known in the art and may be used in the non-integrating polypeptides of the present disclosure, including peptides, peptidomimetics, and non-peptide carriers. For example, a permeant peptide may be derived from the third alpha helix of Drosophila melanogaster transcription factor Antennapaedia, referred to as penetratin, which comprises the amino acid sequence RQIKIWFQNRRMKWKK (SEQ ID NO: 826). As another example, the permeant peptide comprises the HIV-1 tat basic region amino acid sequence, which may include, for example, amino acids 49-57 of naturally-occurring tat protein. Other permeant domains include polyarginine motifs, for example, the region of amino acids 34-56 of HIV-1 rev protein, nona-arginine, octa-arginine, and the like. (See, for example, Futaki et al. (2003) Curr Protein Pept Sci. 2003 April; 4(2): 87-9 and 446; and Wender et al. (2000) Proc. Natl. Acad. Sci. U.S.A 2000 Nov. 21; 97(24):13003-8; published U.S. Patent applications 20030220334; 20030083256; 20030032593; and 20030022831, herein specifically incorporated by reference for the teachings of translocation peptides and peptoids). The nona-arginine (R9) sequence is one of the more efficient PTDs that have been characterized (Wender et al. 2000; Uemura et al. 2002). The site at which the fusion is made may be selected in order to optimize the biological activity, secretion or binding characteristics of the polypeptide. The optimal site will be determined by routine experimentation.

[0562] A Cas9 fusion polypeptide of the present disclosure may be produced in vitro or by eukaryotic cells or by prokaryotic cells, and it may be further processed by unfolding, e.g. heat denaturation, DTT reduction, etc. and may be further refolded, using methods known in the art.

[0563] Modifications of interest that do not alter primary sequence include chemical derivatization of polypeptides, e.g., acylation, acetylation, carboxylation, amidation, etc. Also included are modifications of glycosylation, e.g. those made by modifying the glycosylation patterns of a polypeptide during its synthesis and processing or in further processing steps; e.g. by exposing the polypeptide to enzymes which affect glycosylation, such as mammalian glycosylating or deglycosylating enzymes. Also embraced are sequences that have phosphorylated amino acid residues, e.g. phosphotyrosine, phosphoserine, or phosphothreonine.

[0564] Also suitable for inclusion in embodiments of the present disclosure are nucleic acids (e.g., encoding a Cas9 guide RNA, encoding a Cas9 fusion protein, etc.) and proteins (e.g., a Cas9 fusion protein derived from a wild type protein or a variant protein) that have been modified using ordinary molecular biological techniques and synthetic chemistry so as to improve their resistance to proteolytic degradation, to change the target sequence specificity, to optimize solubility properties, to alter protein activity (e.g., transcription modulatory activity, enzymatic activity, etc.) or to render them more suitable as a therapeutic agent. Analogs of such polypeptides include those containing residues other than naturally occurring L-amino acids, e.g. D-amino acids or non-naturally occurring synthetic amino acids. D-amino acids may be substituted for some or all of the amino acid residues.

[0565] A Cas9 fusion polypeptide of the present disclosure may be prepared by in vitro synthesis, using conventional methods as known in the art. Various commercial synthetic apparatuses are available, for example, automated synthesizers by Applied Biosystems, Inc., Beckman, etc. By using synthesizers, naturally occurring amino acids may be substituted with unnatural amino acids. The particular sequence and the manner of preparation will be determined by convenience, economics, purity required, and the like.

[0566] If desired, various groups may be introduced into the peptide during synthesis or during expression, which allow for linking to other molecules or to a surface. Thus cysteines can be used to make thioethers, histidines for linking to a metal ion complex, carboxyl groups for forming amides or esters, amino groups for forming amides, and the like.

[0567] A Cas9 fusion polypeptide of the present disclosure may also be isolated and purified in accordance with conventional methods of recombinant synthesis. A lysate may be prepared of the expression host and the lysate purified using HPLC, exclusion chromatography, gel electrophoresis, affinity chromatography, or other purification technique. For the most part, the compositions which are used will comprise 20% or more by weight of the desired product, more usually 75% or more by weight, preferably 95% or more by weight, and for therapeutic purposes, usually 99.5% or more by weight, in relation to contaminants related to the method of preparation of the product and its purification. Usually, the percentages will be based upon total protein.

[0568] To induce cleavage or any desired modification to a target nucleic acid (e.g., genomic DNA), or any desired modification to a polypeptide associated with target nucleic acid, the Cas9 guide RNA and/or the Cas9 fusion polypeptide of the present disclosure and/or the donor template sequence, whether they be introduced as nucleic acids or polypeptides, are provided to the cells for about 30 minutes to about 24 hours, e.g., 1 hour, 1.5 hours, 2 hours, 2.5 hours, 3 hours, 3.5 hours 4 hours, 5 hours, 6 hours, 7 hours, 8 hours, 12 hours, 16 hours, 18 hours, 20 hours, or any other period from about 30 minutes to about 24 hours, which may be repeated with a frequency of about every day to about every 4 days, e.g., every 1.5 days, every 2 days, every 3 days, or any other frequency from about every day to about every four days. The agent(s) may be provided to the subject cells one or more times, e.g. one time, twice, three times, or more than three times, and the cells allowed to incubate with the agent(s) for some amount of time following each contacting event e.g. 16-24 hours, after which time the media is replaced with fresh media and the cells are cultured further.

[0569] In cases in which two or more different targeting complexes are provided to the cell (e.g., two different Cas9 guide RNAs that are complementary to different sequences within the same or different target nucleic acid), the complexes may be provided simultaneously (e.g. as two polypeptides and/or nucleic acids), or delivered simultaneously. Alternatively, they may be provided consecutively, e.g. the targeting complex being provided first, followed by the second targeting complex, etc. or vice versa.

Introducing Components into a Target Cell

[0570] A Cas9 guide RNA (or a nucleic acid comprising a nucleotide sequence encoding same and/or a Cas9 fusion polypeptide of the present disclosure (or a nucleic acid that includes a nucleotide sequence encoding a Cas9 fusion polypeptide of the present disclosure) can be introduced into a host cell by any of a variety of well-known methods.

[0571] Methods of introducing a nucleic acid into a host cell are known in the art, and any known method can be used to introduce a nucleic acid (e.g., an expression construct) into a target cell. Suitable methods include, include e.g., viral infection, transfection, conjugation, protoplast fusion, lipofection, electroporation, calcium phosphate precipitation, polyethyleneimine (PEI)-mediated transfection, DEAE-dextran mediated transfection, liposome-mediated transfection, particle gun technology, calcium phosphate precipitation, direct micro injection, nanoparticle-mediated nucleic acid delivery (see, e.g., Panyam et., al Adv Drug Deliv Rev. 2012 Sep. 13. pii: S0169-409X(12)00283-9. doi: 10.1016/j.addr.2012.09.023), and the like.

[0572] In some cases, a Cas9 fusion polypeptide of the present disclosure is provided as a nucleic acid (e.g., an mRNA, a DNA, a plasmid, an expression vector, a viral vector, etc.) that encodes the Cas9 fusion polypeptide. In some cases, the Cas9 fusion polypeptide of the present disclosure is provided directly as a protein. A Cas9 fusion polypeptide of the present disclosure can be introduced into a cell (provided to the cell) by any convenient method; such methods are known to those of ordinary skill in the art. As an illustrative example, a Cas9 fusion polypeptide of the present disclosure can be injected directly into a cell (e.g., with or without nucleic acid encoding a Cas9 guide RNA and with or without a donor polynucleotide). As another example, a preformed complex of a Cas9 fusion polypeptide of the present disclosure and a Cas9 guide RNA (an RNP) can be introduced into a cell (e.g., via nucleofection; via a protein transduction domain (PTD) conjugated to one or more components, e.g., conjugated to the Cas9 protein, conjugated to a guide RNA, conjugated to a Cas9 fusion polypeptide of the present disclosure and a guide RNA; etc.).

### Host Cells

[0573] The present disclosure provides host cells comprising (e.g., genetically modified to comprise) a nucleic acid of the present disclosure. The present disclosure provides host cells comprising (e.g., modified to comprise, e.g., genetically modified to comprise) a recombinant vector of the present disclosure. The modified host cells are in some cases in vitro host cells. In some cases, the modified host cells are in vivo host cells.

[0574] Suitable host cells include, e.g. a bacterial cell; an archaeal cell; a cell of a single-cell eukaryotic organism; a plant cell; an algal cell, e.g., Botryococcus braunii, Chlamydomonas reinhardtii, Nannochloropsis gaditana, Chlorella pyrenoidosa, Sargassum patens, C. agardh, and the like; a fungal cell (e.g., a yeast cell); an animal cell; a cell from an invertebrate animal (e.g. fruit fly, cnidarian, echinoderm, nematode, etc.); a cell from a vertebrate animal (e.g., fish, amphibian, reptile, bird, mammal); a cell from a mammal (e.g., a cell from a rodent, a cell from a human, etc.); and the like.

[0575] A suitable host cell can be a stem cell (e.g. an embryonic stem (ES) cell, an induced pluripotent stem (iPS) cell); a germ cell; a somatic cell, e.g. a fibroblast, a hematopoietic cell, a neuron, a muscle cell, a bone cell, a hepatocyte, a pancreatic cell; an in vitro or in vivo embryonic cell of an embryo at any stage, e.g., a 1-cell, 2-cell, 4-cell, 8-cell, etc. stage zebrafish embryo; etc.). Cells may be from established cell lines or they may be primary cells, where “primary cells”, “primary cell lines”, and “primary cultures” are used interchangeably herein to refer to cells and cells cultures that have been derived from a subject and allowed to grow in vitro for a limited number of passages, i.e. splittings, of the culture. For example, primary cultures include cultures that may have been passaged 0 times, 1 time, 2 times, 4 times, 5 times, 10 times, or 15 times, but not enough times go through the crisis stage. Primary cell lines can be maintained for fewer than 10 passages in vitro. Host cells are in many embodiments unicellular organisms, or are grown in culture.

[0576] If the cells are primary cells, they may be harvest from an organism (e.g., an individual) by any convenient method. For example, leukocytes may be conveniently harvested by apheresis, leukocytapheresis, density gradient separation, etc., while cells from tissues such as skin, muscle, bone marrow, spleen, liver, pancreas, lung, intestine, stomach, etc. are most conveniently harvested by biopsy. An appropriate solution may be used for dispersion or suspension of the harvested cells. Such solution will generally be a balanced salt solution, e.g. normal saline, phosphate-buffered saline (PBS), Hank's balanced salt solution, etc., conveniently supplemented with fetal calf serum or other naturally occurring factors, in conjunction with an acceptable buffer at low concentration, e.g., from 5-25 mM. Convenient buffers include HEPES, phosphate buffers, lactate buffers, etc. The cells may be used immediately, or they may be stored, frozen, for long periods of time, being thawed and capable of being reused. In such cases, the cells can be frozen in 10% dimethyl sulfoxide (DMSO), 50% serum, 40% buffered medium, or some other such solution as is commonly used in the art to preserve cells at such freezing temperatures, and thawed in a manner as commonly known in the art for thawing frozen cultured cells.

[0577] In some embodiments, a subject genetically modified host cell is in vitro. In some embodiments, a subject genetically modified host cell is in vivo. In some embodiments, a subject genetically modified host cell is a prokaryotic cell or is derived from a prokaryotic cell. In some embodiments, a subject genetically modified host cell is a bacterial cell or is derived from a bacterial cell. In some embodiments, a subject genetically modified host cell is an archaeal cell or is derived from an archaeal cell. In some embodiments, a subject genetically modified host cell is a eukaryotic cell or is derived from a eukaryotic cell. In some embodiments, a subject genetically modified host cell is a plant cell or is derived from a plant cell. In some embodiments, a subject genetically modified host cell is an animal cell or is derived from an animal cell. In some embodiments, a subject genetically modified host cell is an invertebrate cell or is derived from an invertebrate cell. In some embodiments, a subject genetically modified host cell is a vertebrate cell or is derived from a vertebrate cell. In some embodiments, a subject genetically modified host cell is a mammalian cell or is derived from a mammalian cell. In some embodiments, a subject genetically modified host cell is a rodent cell or is derived from a rodent cell. In some embodiments, a subject genetically modified host cell is a human cell or is derived from a human cell.

[0578] The present disclosure further provides progeny of a subject genetically modified cell, where the progeny can comprise the same exogenous nucleic acid or polypeptide as the subject genetically modified cell from which it was derived. The present disclosure further provides a composition comprising a subject genetically modified host cell.

### Donor Polynucleotide (Donor Template)

[0579] In some cases, the contacting occurs under conditions that are permissive for nonhomologous end joining or homology-directed repair. In some cases, the method further comprises contacting the target DNA with a donor polynucleotide, wherein the donor polynucleotide, a portion of the donor polynucleotide, a copy of the donor polynucleotide, or a portion of a copy of the donor polynucleotide integrates into the target DNA. In some cases, the method does not comprise contacting a cell with a donor polynucleotide, and the target DNA is modified such that nucleotides within the target DNA are deleted.

[0580] In some cases, Cas9 guide RNA and a Cas9 fusion polypeptide are coadministered (e.g., contacted with a target nucleic acid, administered to cells, etc.) with a donor polynucleotide sequence that includes at least a segment with homology to the target DNA sequence, the subject methods may be used to add, i.e. insert or replace, nucleic acid material to a target DNA sequence (e.g. to “knock in” a nucleic acid that encodes for a protein, an siRNA, an miRNA, etc.), to add a tag (e.g., 6×His, a fluorescent protein (e.g., a green fluorescent protein; a yellow fluorescent protein, etc.), hemagglutinin (HA), FLAG, etc.), to add a regulatory sequence to a gene (e.g. promoter, polyadenylation signal, internal ribosome entry sequence (IRES), 2A peptide, start codon, stop codon, splice signal, localization signal, etc.), to modify a nucleic acid sequence (e.g., introduce a mutation), and the like. As such, a complex comprising a Cas9 guide RNA and a Cas9 fusion polypeptide is useful in any in vitro or in vivo application in which it is desirable to modify DNA in a site-specific, i.e. “targeted”, way, for example gene knock-out, gene knock-in, gene editing, gene tagging, etc., as used in, for example, gene therapy, e.g. to treat a disease or as an antiviral, antipathogenic, or anticancer therapeutic, the production of genetically modified organisms in agriculture, the large scale production of proteins by cells for therapeutic, diagnostic, or research purposes, the induction of iPS cells, biological research, the targeting of genes of pathogens for deletion or replacement, etc.

[0581] In applications in which it is desirable to insert a polynucleotide sequence into a target DNA sequence, a polynucleotide comprising a donor sequence to be inserted is also provided to the cell. By a “donor sequence” or “donor polynucleotide” it is meant a nucleic acid sequence to be inserted at the cleavage site induced by a Cas9 fusion polypeptide. The donor polynucleotide will contain sufficient homology to a genomic sequence at the cleavage site, e.g. 70%, 80%, 85%, 90%, 95%, or 100% homology with the nucleotide sequences flanking the cleavage site, e.g. within about 50 bases or less of the cleavage site, e.g. within about 30 bases, within about 15 bases, within about 10 bases, within about 5 bases, or immediately flanking the cleavage site, to support homology-directed repair between it and the genomic sequence to which it bears homology. Approximately 25, 50, 100, or 200 nucleotides, or more than 200 nucleotides, of sequence homology between a donor and a genomic sequence (or any integral value between 10 and 200 nucleotides, or more) will support homology-directed repair. Donor sequences can be of any length, e.g. 10 nucleotides or more, 50 nucleotides or more, 100 nucleotides or more, 250 nucleotides or more, 500 nucleotides or more, 1000 nucleotides or more, 5000 nucleotides or more, etc.

[0582] The donor sequence is typically not identical to the genomic sequence that it replaces. Rather, the donor sequence may contain at least one or more single base changes, insertions, deletions, inversions or rearrangements with respect to the genomic sequence, so long as sufficient homology is present to support homology-directed repair. In some embodiments, the donor sequence comprises a non-homologous sequence flanked by two regions of homology, such that homology-directed repair between the target DNA region and the two flanking sequences results in insertion of the non-homologous sequence at the target region. Donor sequences may also comprise a vector backbone containing sequences that are not homologous to the DNA region of interest and that are not intended for insertion into the DNA region of interest. Generally, the homologous region(s) of a donor sequence will have at least 50% sequence identity to a genomic sequence with which recombination is desired. In certain embodiments, 60%, 70%, 80%, 90%, 95%, 98%, 99%, or 99.9% sequence identity is present. Any value between 1% and 100% sequence identity can be present, depending upon the length of the donor polynucleotide.

[0583] The donor sequence may comprise certain sequence differences as compared to the genomic sequence, e.g. restriction sites, nucleotide polymorphisms, selectable markers (e.g., drug resistance genes, fluorescent proteins, enzymes etc.), etc., which may be used to assess for successful insertion of the donor sequence at the cleavage site or in some cases may be used for other purposes (e.g., to signify expression at the targeted genomic locus). In some cases, if located in a coding region, such nucleotide sequence differences will not change the amino acid sequence, or will make silent amino acid changes (i.e., changes which do not affect the structure or function of the protein). Alternatively, these sequences differences may include flanking recombination sequences such as FLPs, loxP sequences, or the like, that can be activated at a later time for removal of the marker sequence.

[0584] The donor sequence may be provided to the cell as single-stranded DNA, single-stranded RNA, double-stranded DNA, or double-stranded RNA. It may be introduced into a cell in linear or circular form. If introduced in linear form, the ends of the donor sequence may be protected (e.g., from exonucleolytic degradation) by methods known to those of skill in the art. For example, one or more dideoxynucleotide residues are added to the 3′ terminus of a linear molecule and/or self-complementary oligonucleotides are ligated to one or both ends. See, for example, Chang et al. (1987) Proc. Natl. Acad Sci USA 84:4959-4963; Nehls et al. (1996) Science 272:886-889. Additional methods for protecting exogenous polynucleotides from degradation include, but are not limited to, addition of terminal amino group(s) and the use of modified internucleotide linkages such as, for example, phosphorothioates, phosphoramidates, and O-methyl ribose or deoxyribose residues. As an alternative to protecting the termini of a linear donor sequence, additional lengths of sequence may be included outside of the regions of homology that can be degraded without impacting recombination. A donor sequence can be introduced into a cell as part of a vector molecule having additional sequences such as, for example, replication origins, promoters and genes encoding antibiotic resistance. Moreover, donor sequences can be introduced as naked nucleic acid, as nucleic acid complexed with an agent such as a liposome or poloxamer, or can be delivered by viruses (e.g., adenovirus, AAV), as described above for nucleic acids encoding a Cas9 guide RNA and/or a Cas9 fusion polypeptide and/or donor polynucleotide.

### Non-Human Genetically Modified Organisms

[0585] In some embodiments, a genetically modified host cell has been genetically modified with an exogenous nucleic acid comprising a nucleotide sequence encoding a subject Cas9 fusion polypeptide (e.g., a Cas9 fusion polypeptide of the present disclosure comprising wild-type (WT) Cas9 sequences; a Cas9 fusion polypeptide of the present disclosure comprising a variant Cas9 polypeptide, having one or more mutations relative to a WT Cas9, such as a Cas9 with reduced nuclease activity). If such a cell is a eukaryotic single-cell organism, then the modified cell can be considered a genetically modified organism. In some embodiments, subject non-human genetically modified organism is a Cas9 transgenic multicellular organism.

[0586] In some embodiments, a subject genetically modified non-human host cell (e.g., a cell that has been genetically modified with an exogenous nucleic acid comprising a nucleotide sequence encoding a subject Cas9 fusion polypeptide can generate a subject genetically modified non-human organism (e.g., a mouse, a fish, a frog, a fly, a worm, etc.). For example, if the genetically modified host cell is a pluripotent stem cell (i.e., PSC) or a germ cell (e.g., sperm, oocyte, etc.), an entire genetically modified organism can be derived from the genetically modified host cell. In some embodiments, the genetically modified host cell is a pluripotent stem cell (e.g., ESC, iPSC, pluripotent plant stem cell, etc.) or a germ cell (e.g., sperm cell, oocyte, etc.), either in vivo or in vitro, that can give rise to a genetically modified organism. In some embodiments the genetically modified host cell is a vertebrate PSC (e.g., ESC, iPSC, etc.) and is used to generate a genetically modified organism (e.g. by injecting a PSC into a blastocyst to produce a chimeric/mosaic animal, which could then be mated to generate non-chimeric/non-mosaic genetically modified organisms; grafting in the case of plants; etc.). Any convenient method/protocol for producing a genetically modified organism is suitable for producing a genetically modified host cell comprising an exogenous nucleic acid comprising a nucleotide sequence encoding a subject Cas9 fusion polypeptide. Methods of producing genetically modified organisms are known in the art. For example, see Cho et al., Curr Protoc Cell Biol. 2009 March; Chapter 19:Unit 19.11: Generation of transgenic mice; Gama et al., Brain Struct Funct. 2010 March; 214(2-3):91-109. Epub 2009 Nov. 25: Animal transgenesis: an overview; Husaini et al., GM Crops. 2011 June-December; 2(3):150-62. Epub 2011 Jun. 1: Approaches for gene targeting and targeted gene expression in plants.

[0587] In some embodiments, a genetically modified organism comprises a target cell for methods of the invention, and thus can be considered a source for target cells. For example, if a genetically modified cell comprising one or more exogenous nucleic acids comprising nucleotide sequences encoding a subject Cas9 fusion polypeptide is used to generate a genetically modified organism, then the cells of the genetically modified organism comprise the one or more exogenous nucleic acids comprising nucleotide sequences encoding the subject Cas9 fusion polypeptide. In some such embodiments, the DNA of a cell or cells of the genetically modified organism can be targeted for modification by introducing into the cell or cells a Cas9 guide RNA (e.g., a truncated Cas9 guide RNA) (or a nucleic acid encoding the Cas9 guide RNA) and in some cases a ligand for a heterologous polypeptide inserted in the Cas9 fusion polypeptide and that binds and/or undergoes a conformational change upon contacting the ligand (e.g., to induce binding to a binding partner of the heterologous polypeptide, to induce a conformational change of the Cas9 fusion polypeptide, etc.) (e.g., and/or in some cases a donor polynucleotide). For example, the introduction of a Cas9 guide RNA (or a DNA encoding the same) into a subset of cells (e.g., brain cells, intestinal cells, kidney cells, lung cells, blood cells, etc.) of the genetically modified organism can target the DNA of such cells for modification, the genomic location of which will depend on the targeting sequence of the introduced Cas9 guide RNA.

[0588] In some embodiments, a genetically modified organism is a source of target cells for methods of the invention. For example, a genetically modified organism comprising cells that are genetically modified with an exogenous nucleic acid comprising a nucleotide sequence encoding a subject Cas9 fusion polypeptide can provide a source of genetically modified cells, for example PSCs (e.g., ESCs, iPSCs, sperm, oocytes, etc.), neurons, progenitor cells, cardiomyocytes, etc.

[0589] In some embodiments, a genetically modified cell is a PSC comprising an exogenous nucleic acid comprising a nucleotide sequence encoding a subject Cas9 fusion polypeptide. As such, the PSC can be a target cell such that the DNA of the PSC can be targeted for modification by introducing into the PSC a Cas9 guide RNA (e.g., a truncated Cas9 guide RNA) (or a nucleic acid encoding the Cas9 guide RNA) and in some cases a ligand for a heterologous polypeptide inserted in the Cas9 fusion polypeptide and that binds and/or undergoes a conformational change upon contacting the ligand (e.g., light, a dimerizing agent, etc.), and optionally a donor nucleic acid (donor polynucleotide), and the genomic location of the modification will depend on the targeting sequence of the introduced Cas9 guide RNA. Thus, in some embodiments, the methods described herein can be used to modify the DNA (e.g., delete and/or replace any desired genomic location) of PSCs derived from a subject genetically modified organism. Such modified PSCs can then be used to generate organisms having both (i) an exogenous nucleic acid comprising a nucleotide sequence encoding a subject Cas9 fusion polypeptide and (ii) a DNA modification that was introduced into the PSC.

[0590] An exogenous nucleic acid comprising a nucleotide sequence encoding a subject Cas9 fusion polypeptide (e.g., comprising: wild-type (WT) Cas9 sequences; a variant Cas9, having mutations relative to a WT Cas9, such as a Cas9 with reduced nuclease activity, etc.) can be under the control of (i.e., operably linked to) an unknown promoter (e.g., when the nucleic acid randomly integrates into a host cell genome) or can be under the control of (i.e., operably linked to) a known promoter. Suitable known promoters can be any known promoter and include constitutively active promoters (e.g., CMV promoter), inducible promoters (e.g., heat shock promoter, Tetracycline-regulated promoter, Steroid-regulated promoter, Metal-regulated promoter, estrogen receptor-regulated promoter, etc.), spatially restricted and/or temporally restricted promoters (e.g., a tissue specific promoter, a cell type specific promoter, etc.), etc.

[0591] A subject genetically modified non-human organism can be any organism other than a human, including for example, a plant; algae; an invertebrate (e.g., a cnidarian, an echinoderm, a worm, a fly, etc.); a vertebrate (e.g., a fish (e.g., zebrafish, puffer fish, gold fish, etc.), an amphibian (e.g., salamander, frog, etc.), a reptile, a bird, a mammal, etc.); an ungulate (e.g., a goat, a pig, a sheep, a cow, etc.); a rodent (e.g., a mouse, a rat, a hamster, a guinea pig); a lagomorpha (e.g., a rabbit); etc.

### Transgenic Non-Human Animals

[0592] As described above, in some embodiments, a subject nucleic acid (e.g., one or more nucleic acids comprising nucleotide sequences encoding a subject Cas9 fusion polypeptide, e.g., a Cas9 fusion polypeptide comprising: WT Cas9 sequences; a variant Cas9, having mutations relative to a WT Cas9, such as a Cas9 with reduced nuclease activity, etc.; and the like), e.g., a recombinant expression vector, is used as a transgene to generate a transgenic animal that produces a Cas9 fusion polypeptide. Thus, the present disclosure further provides a transgenic non-human animal, which animal comprises a transgene comprising a subject nucleic acid comprising a nucleotide sequence encoding a Cas9 fusion polypeptide (e.g., one ore more nucleic acids comprising nucleotide sequences encoding a Cas9 fusion polypeptide). In some embodiments, the genome of the transgenic non-human animal comprises a subject nucleotide sequence encoding a Cas9 fusion polypeptide. In some embodiments, the transgenic non-human animal is homozygous for the genetic modification. In some embodiments, the transgenic non-human animal is heterozygous for the genetic modification. In some embodiments, the transgenic non-human animal is a vertebrate, for example, a fish (e.g., zebra fish, gold fish, puffer fish, cave fish, etc.), an amphibian (frog, salamander, etc.), a bird (e.g., chicken, turkey, etc.), a reptile (e.g., snake, lizard, etc.), a mammal (e.g., an ungulate, e.g., a pig, a cow, a goat, a sheep, etc.; a lagomorph (e.g., a rabbit); a rodent (e.g., a rat, a mouse); a non-human primate; etc.), etc.

[0593] Nucleotide sequences encoding a Cas9 fusion polypeptide (e.g., one or more nucleic acids comprising nucleotide sequences encoding a Cas9 fusion polypeptide) can be under the control of (i.e., operably linked to) an unknown promoter (e.g., when the nucleic acid randomly integrates into a host cell genome) or can be under the control of (i.e., operably linked to) a known promoter. Suitable known promoters can be any known promoter and include constitutively active promoters (e.g., CMV promoter), inducible promoters (e.g., heat shock promoter, Tetracycline-regulated promoter, Steroid-regulated promoter, Metal-regulated promoter, estrogen receptor-regulated promoter, etc.), spatially restricted and/or temporally restricted promoters (e.g., a tissue specific promoter, a cell type specific promoter, etc.), etc.

### Transgenic Plants

[0594] As described above, in some embodiments, a subject nucleic acid (e.g., one or more nucleic acids comprising nucleotide sequences encoding a subject Cas9 fusion polypeptide, e.g., a Cas9 fusion polypeptide comprising: WT Cas9 sequences; a variant Cas9, having mutations relative to a WT Cas9, such as a Cas9 with reduced nuclease activity; and the like), e.g., a recombinant expression vector, is used as a transgene to generate a transgenic plant that produces a Cas9 fusion polypeptide. Thus, the present disclosure further provides a transgenic plant, which plant comprises a transgene comprising a subject nucleic acid comprising a nucleotide sequence encoding a Cas9 fusion polypeptide (e.g., one or more nucleic acids comprising nucleotide sequences encoding a Cas9 fusion polypeptide). In some embodiments, the genome of the transgenic plant comprises a subject nucleic acid. In some embodiments, the transgenic plant is homozygous for the genetic modification. In some embodiments, the transgenic plant is heterozygous for the genetic modification.

[0595] Methods of introducing exogenous nucleic acids into plant cells are well known in the art. Such plant cells are considered “transformed,” as defined above. Suitable methods include viral infection (such as double stranded DNA viruses), transfection, conjugation, protoplast fusion, electroporation, particle gun technology, calcium phosphate precipitation, direct microinjection, silicon carbide whiskers technology, Agrobacterium-mediated transformation and the like. The choice of method is generally dependent on the type of cell being transformed and the circumstances under which the transformation is taking place (i.e. in vitro, ex vivo, or in vivo).

[0596] Transformation methods based upon the soil bacterium Agrobacterium tumefaciens are particularly useful for introducing an exogenous nucleic acid molecule into a vascular plant. The wild type form of Agrobacterium contains a Ti (tumor-inducing) plasmid that directs production of tumorigenic crown gall growth on host plants. Transfer of the tumor-inducing T-DNA region of the Ti plasmid to a plant genome requires the Ti plasmid-encoded virulence genes as well as T-DNA borders, which are a set of direct DNA repeats that delineate the region to be transferred. An Agrobacterium-based vector is a modified form of a Ti plasmid, in which the tumor inducing functions are replaced by the nucleic acid sequence of interest to be introduced into the plant host.

[0597] Agrobacterium-mediated transformation generally employs cointegrate vectors or binary vector systems, in which the components of the Ti plasmid are divided between a helper vector, which resides permanently in the Agrobacterium host and carries the virulence genes, and a shuttle vector, which contains the gene of interest bounded by T-DNA sequences. A variety of binary vectors is well known in the art and are commercially available, for example, from Clontech (Palo Alto, Calif.). Methods of coculturing Agrobacterium with cultured plant cells or wounded tissue such as leaf tissue, root explants, hypocotyledons, stem pieces or tubers, for example, also are well known in the art. See, e.g., Glick and Thompson, (eds.), Methods in Plant Molecular Biology and Biotechnology, Boca Raton, Fla.: CRC Press (1993).

[0598] Microprojectile-mediated transformation also can be used to produce a subject transgenic plant. This method, first described by Klein et al. (Nature 327:70-73 (1987)), relies on microprojectiles such as gold or tungsten that are coated with the desired nucleic acid molecule by precipitation with calcium chloride, spermidine or polyethylene glycol. The microprojectile particles are accelerated at high speed into an angiosperm tissue using a device such as the BIOLISTIC PD-1000 (Biorad; Hercules Calif.).

[0599] A subject nucleic acid may be introduced into a plant in a manner such that the nucleic acid is able to enter a plant cell(s), e.g., via an in vivo or ex vivo protocol. By “in vivo,” it is meant in the nucleic acid is administered to a living body of a plant e.g. infiltration. By “ex vivo” it is meant that cells or explants are modified outside of the plant, and then such cells or organs are regenerated to a plant. A number of vectors suitable for stable transformation of plant cells or for the establishment of transgenic plants have been described, including those described in Weissbach and Weissbach, (1989) Methods for Plant Molecular Biology Academic Press, and Gelvin et al., (1990) Plant Molecular Biology Manual, Kluwer Academic Publishers. Specific examples include those derived from a Ti plasmid of Agrobacterium tumefaciens, as well as those disclosed by Herrera-Estrella et al. (1983) Nature 303: 209, Bevan (1984) Nucl Acid Res. 12: 8711-8721, Klee (1985) Bio/Technolo 3: 637-642. Alternatively, non-Ti vectors can be used to transfer the DNA into plants and cells by using free DNA delivery techniques. By using these methods transgenic plants such as wheat, rice (Christou (1991) Bio/Technology 9:957-9 and 4462) and corn (Gordon-Kamm (1990) Plant Cell 2: 603-618) can be produced. An immature embryo can also be a good target tissue for monocots for direct DNA delivery techniques by using the particle gun (Weeks et al. (1993) Plant Physiol 102: 1077-1084; Vasil (1993) Bio/Technolo 10: 667-674; Wan and Lemeaux (1994) Plant Physiol 104: 37-48 and for Agrobacterium-mediated DNA transfer (Ishida et al. (1996) Nature Biotech 14: 745-750). Exemplary methods for introduction of DNA into chloroplasts are biolistic bombardment, polyethylene glycol transformation of protoplasts, and microinjection (Danieli et al Nat. Biotechnol 16:345-348, 1998; Staub et al Nat. Biotechnol 18: 333-338, 2000; O'Neill et al Plant J. 3:729-738, 1993; Knoblauch et al Nat. Biotechnol 17: 906-909; U.S. Pat. Nos. 5,451,513, 5,545,817, 5,545,818, and 5,576,198; in Intl. Application No. WO 95/16783; and in Boynton et al., Methods in Enzymology 217: 510-536 (1993), Svab et al., Proc. Natl. Acad. Sci. USA 90: 913-917 (1993), and McBride et al., Proc. Natl. Acad. Sci. USA 91: 7301-7305 (1994)). Any vector suitable for the methods of biolistic bombardment, polyethylene glycol transformation of protoplasts and microinjection will be suitable as a targeting vector for chloroplast transformation. Any double stranded DNA vector may be used as a transformation vector, especially when the method of introduction does not utilize Agrobacterium.

[0600] Plants which can be genetically modified include grains, forage crops, fruits, vegetables, oil seed crops, palms, forestry, and vines. Specific examples of plants which can be modified follow: maize, banana, peanut, field peas, sunflower, tomato, canola, tobacco, wheat, barley, oats, potato, soybeans, cotton, carnations, sorghum, lupin and rice.

[0601] Also provided by the subject disclosure are transformed plant cells, tissues, plants and products that contain the transformed plant cells. A feature of the subject transformed cells, and tissues and products that include the same is the presence of a subject nucleic acid integrated into the genome, and production by plant cells of a fusion Cas9 polypeptide. Recombinant plant cells of the present invention are useful as populations of recombinant cells, or as a tissue, seed, whole plant, stem, fruit, leaf, root, flower, stem, tuber, grain, animal feed, a field of plants, and the like.

[0602] Nucleotide sequences encoding a fusion Cas9 polypeptide can be under the control of (i.e., operably linked to) an unknown promoter (e.g., when the nucleic acid randomly integrates into a host cell genome) or can be under the control of (i.e., operably linked to) a known promoter. Suitable known promoters can be any known promoter and include constitutively active promoters, inducible promoters, spatially restricted and/or temporally restricted promoters, etc.

### Methods

[0603] A Cas9 fusion polypeptide of the present disclosure finds use in a variety of methods. A subject Cas9 fusion polypeptide can be used in any method that a Cas9 protein can be used. For example, a Cas9 fusion polypeptide, or a variant thereof, can be used to (i) modify (e.g., cleave, e.g., nick; methylate; etc.) target nucleic acid (DNA or RNA; single stranded or double stranded); (ii) modulate transcription of a target nucleic acid; (iii) label a target nucleic acid; (iv) bind a target nucleic acid (e.g., for purposes of isolation, labeling, imaging, tracking, etc.); (v) modify a polypeptide (e.g., a histone) associated with a target nucleic acid; and the like. Because a method that uses a Cas9 fusion polypeptide includes binding of the fusion polypeptide to a particular region in a target nucleic acid (by virtue of being targeted there by an associated Cas9 guide RNA), the methods are generally referred to herein as methods of binding (e.g., a method of binding a target nucleic acid). However, it is to be understood that in some cases, while a method of binding may result in nothing more than binding of the target nucleic acid, in other cases, the method can have different final results (e.g., the method can result in modification of the target nucleic acid, e.g., cleavage/methylation/etc., modulation of transcription from the target nucleic acid, modulation of translation of the target nucleic acid, genome editing, modulation of a protein associated with the target nucleic acid, isolation of the target nucleic acid, etc.). For examples of suitable methods, Cas9 variants, guide RNAs, etc., see, for example, Jinek et al., Science. 2012 Aug. 17; 337(6096):816-21; Chylinski et al., RNA Biol. 2013 May; 10(5):726-37; Ma et al., Biomed Res Int. 2013; 2013:270805; Hou et al., Proc Natl Acad Sci USA. 2013 Sep. 24; 110(39):15644-9; Jinek et al., Elife. 2013; 2:e00471; Pattanayak et al., Nat Biotechnol. 2013 September; 31(9):839-43; Qi et al, Cell. 2013 Feb. 28; 152(5):1173-83; Wang et al., Cell. 2013 May 9; 153(4):910-8; Auer et al., Genome Res. 2013 Oct. 31; Chen et al., Nucleic Acids Res. 2013 Nov. 1; 41(20):e19; Cheng et al., Cell Res. 2013 October; 23(10):1163-71; Cho et al., Genetics. 2013 November; 195(3):1177-80; DiCarlo et al., Nucleic Acids Res. 2013 April; 41(7):4336-43; Dickinson et al., Nat Methods. 2013 October; 10(10):1028-34; Ebina et al., Sci Rep. 2013; 3:2510; Fujii et al, Nucleic Acids Res. 2013 Nov. 1; 41(20):e187; Hu et al., Cell Res. 2013 November; 23(11):1322-5; Jiang et al., Nucleic Acids Res. 2013 Nov. 1; 41(20):e188; Larson et al., Nat Protoc. 2013 November; 8(11):2180-96; Mali et. at., Nat Methods. 2013 October; 10(10):957-63; Nakayama et al., Genesis. 2013 December; 51(12):835-43; Ran et al., Nat Protoc. 2013 November; 8(11):2281-308; Ran et al., Cell. 2013 Sep. 12; 154(6):1380-9; Upadhyay et al., G3 (Bethesda). 2013 Dec. 9; 3(12):2233-8; Walsh et al., Proc Natl Acad Sci USA. 2013 Sep. 24; 110(39):15514-5; Xie et al., Mol Plant. 2013 Oct. 9; Yang et al., Cell. 2013 Sep. 12; 154(6):1370-9; and U.S. patents and patent applications: U.S. Pat. Nos. 8,906,616; 8,895,308; 8,889,418; 8,889,356; 8,871,445; 8,865,406; 8,795,965; 8,771,945; 8,697,359; 20140068797; 20140170753; 20140179006; 20140179770; 20140186843; 20140186919; 20140186958; 20140189896; 20140227787; 20140234972; 20140242664; 20140242699; 20140242700; 20140242702; 20140248702; 20140256046; 20140273037; 20140273226; 20140273230; 20140273231; 20140273232; 20140273233; 20140273234; 20140273235; 20140287938; 20140295556; 20140295557; 20140298547; 20140304853; 20140309487; 20140310828; 20140310830; 20140315985; 20140335063; 20140335620; 20140342456; 20140342457; 20140342458; 20140349400; 20140349405; 20140356867; 20140356956; 20140356958; 20140356959; 20140357523; 20140357530; 20140364333; and 20140377868; all of which are hereby incorporated by reference in their entirety.

[0604] For example, the present disclosure provides (but is not limited to) methods of cleaving a target nucleic acid; methods of editing a target nucleic acid; methods of modulating transcription from a target nucleic acid; methods of isolating a target nucleic acid, methods of binding a target nucleic acid, methods of imaging a target nucleic acid, methods of modifying a target nucleic acid, and the like.

[0605] As used herein, the terms/phrases “contact a target nucleic acid” and “contacting a target nucleic acid”, for example, with a Cas9 fusion polypeptide, etc., encompass all methods for contacting the target nucleic acid. For example, a Cas9 fusion polypeptide can be provided as protein, RNA (encoding the Cas9 fusion polypeptide), or DNA (encoding the Cas9 fusion polypeptide); while a Cas9 guide RNA can be provided as a guide RNA or as a nucleic acid encoding the guide RNA. As such, when, for example, performing a method in a cell (e.g., inside of a cell in vitro, inside of a cell in vivo, inside of a cell ex vivo), a method that includes contacting the target nucleic acid encompasses the introduction into the cell of any or all of the components in their active/final state (e.g., in the form of a protein(s) for Cas9 fusion polypeptide, in the form of an RNA in some cases for the guide RNA), and also encompasses the introduction into the cell of one or more nucleic acids encoding one or more of the components (e.g., nucleic acid(s) having nucleotide sequence(s) encoding Cas9 fusion polypeptide protein(s), nucleic acid(s) having nucleotide sequence(s) encoding guide RNA(s), and the like). Because the methods can also be performed in vitro outside of a cell, a method that includes contacting a target nucleic acid, (unless otherwise specified) encompasses contacting outside of a cell in vitro, inside of a cell in vitro, inside of a cell in vivo, inside of a cell ex vivo, etc.

[0606] In some cases, a subject method is a method that includes contacting a target nucleic acid with a subject Cas9 fusion polypeptide. In some cases, a subject method includes contacting a target nucleic acid with a Cas9 fusion polypeptide and a Cas9 guide RNA (e.g., a truncated Cas9 guide RNA, e.g., not having stem loops 2 or 3). In some cases, a subject method includes contacting a target nucleic acid with a Cas9 fusion polypeptide and a Cas9 guide RNA (e.g., a truncated guide RNA, e.g., not having stem loops 2 or 3) and a ligand for a heterologous polypeptide inserted in the Cas9 fusion polypeptide and that binds and/or undergoes a conformational change upon contacting the ligand (e.g., light, a dimerizing agent, etc.). In some cases, a method is a method of contacting a target nucleic acid with a system. In some cases, the system can include: (i) a subject Cas9 fusion polypeptide and a Cas9 guide RNA; (ii) a subject Cas9 fusion polypeptide and a Cas9 guide RNA and a ligand for a heterologous polypeptide; or (iii) a subject Cas9 fusion polypeptide and a Cas9 guide RNA and a ligand for a heterologous polypeptide and a donor polynucleotide.

[0607] Thus, in some cases, where the Cas9 fusion polypeptide includes a heterologous polypeptide that conditionally binds to a binding partner and confers inducible activity to the Cas9 fusion polypeptide, the subject method includes contacting the Cas9 fusion polypeptide to a condition that induces activity of the Cas9 fusion polypeptide, thereby contacting a target nucleic acid to the active Cas9 fusion polypeptide. In some cases, the condition that induces activity of the Cas9 fusion polypeptide includes contacting the Cas9 fusion polypeptide with a ligand (or an increasing or reducing the amount of a ligand) that binds to and/or induces a conformational change in the heterologous polypeptide inserted in the Cas9 fusion polypeptide. The ligand may be any suitable ligand that binds to and/or induces a conformational change in the heterologous polypeptide. In some cases, the ligand is a small molecule (e.g., rapamycin, 4-hydroxytamoxifen (4-HT), etc.), light, a receptor ligand (e.g., 4-hydroxytamoxifen (4-HT)), a metabolite (e.g., cAMP; lactate; etc.), an ion (Ca²⁺, Zn²⁺, Cu²⁺, Na⁺, Cl, K, etc.), etc. In some cases, the condition is a cellular signaling event that causes post-translational modification of the heterologous polypeptide (e.g., activating a kinase cascade to phosphorylate a kinase substrate in the heterologous polypeptide; depolarizing an excitable cell to increase intracellular calcium concentration and activate a Cas9 fusion polypeptide that contains a heterologous polypeptide with a calcium binding domain, etc.) In some cases, the conditions necessary to modulate activity of a subject Cas9 fusion polypeptide may be provided indirectly to the cell or tissue in which the Cas9 fusion polypeptide resides, e.g., by administering a drug to an organism that activates a kinase cascade in a cell of interest, which in turn phosphorylates a kinase substrate in the heterologous polypeptide; providing a sensory stimulation to an organism that activates a neural circuit, that in turn depolarizes a neuron of interest to increase intracellular calcium concentration and activate a Cas9 fusion polypeptide that contains a heterologous polypeptide with a calcium binding domain, etc.

### Target Nucleic Acids and Target Cells of Interest

[0608] A Cas9 fusion polypeptide of the present disclosure, when bound to a guide RNA, can bind to a target nucleic acid, and in some cases, can bind to and modify a target nucleic acid. A target nucleic acid can be any nucleic acid (e.g., DNA, RNA), can be double stranded or single stranded, can be any type of nucleic acid (e.g., a chromosome, derived from a chromosome, chromosomal, plasmid, viral, extracellular, intracellular, mitochondrial, chloroplast, linear, circular, etc.) and can be from any organism (e.g., as long as the Cas9 guide RNA can hybridize to a target sequence in a target nucleic acid, that target nucleic acid can be targeted).

[0609] A target nucleic acid can be DNA or RNA. A target nucleic acid can be double stranded (e.g., dsDNA, dsRNA) or single stranded (e.g., ssRNA, ssDNA). In some cases, a target nucleic acid is single stranded. In some cases, a target nucleic acid is a single stranded RNA (ssRNA). In some cases, a target ssRNA (e.g., a target cell ssRNA, a viral ssRNA, etc.) is selected from: mRNA, rRNA, tRNA, non-coding RNA (ncRNA), long non-coding RNA (IncRNA), and microRNA (miRNA). In some cases, a target nucleic acid is a single stranded DNA (ssDNA) (e.g., a viral DNA). As noted above, in some cases, a target nucleic acid is single stranded.

[0610] A target nucleic acid can be located anywhere, for example, outside of a cell in vitro, inside of a cell in vitro, inside of a cell in vivo, inside of a cell ex vivo. Suitable target cells (which can comprise target nucleic acids) include, but are not limited to: a bacterial cell; an archaeal cell; a cell of a single-cell eukaryotic organism; a plant cell; an algal cell, e.g., Botryococcus braunii, Chlamydomonas reinhardtii, Nannochloropsis gaditana, Chlorella pyrenoidosa, Sargassum patens, C. agardh, and the like; a fungal cell (e.g., a yeast cell); an animal cell; a cell from an invertebrate animal (e.g. fruit fly, cnidarian, echinoderm, nematode, etc.); a cell from a vertebrate animal (e.g., fish, amphibian, reptile, bird, mammal); a cell from a mammal (e.g., a cell from a rodent, a cell from a human, etc.); and the like. Any type of cell may be of interest (e.g. a stem cell, e.g. an embryonic stem (ES) cell, an induced pluripotent stem (iPS) cell, a germ cell (e.g., an oocyte, a sperm, an oogonia, a spermatogonia, etc.), a somatic cell, e.g. a fibroblast, a hematopoietic cell, a neuron, a muscle cell, a bone cell, a hepatocyte, a pancreatic cell; an in vitro or in vivo embryonic cell of an embryo at any stage, e.g., a 1-cell, 2-cell, 4-cell, 8-cell, etc. stage zebrafish embryo; etc.). Cells may be from established cell lines or they may be primary cells, where “primary cells”, “primary cell lines”, and “primary cultures” are used interchangeably herein to refer to cells and cells cultures that have been derived from a subject and allowed to grow in vitro for a limited number of passages, i.e. splittings, of the culture. For example, primary cultures are cultures that may have been passaged 0 times, 1 time, 2 times, 4 times, 5 times, 10 times, or 15 times, but not enough times go through the crisis stage. Typically, the primary cell lines are maintained for fewer than 10 passages in vitro. Target cells can be unicellular organisms and/or can be grown in culture. If the cells are primary cells, they may be harvest from an individual by any convenient method. For example, leukocytes may be conveniently harvested by apheresis, leukocytapheresis, density gradient separation, etc., while cells from tissues such as skin, muscle, bone marrow, spleen, liver, pancreas, lung, intestine, stomach, etc. can be conveniently harvested by biopsy.

[0611] In some of the above applications, the subject methods may be employed to induce target nucleic acid cleavage, target nucleic acid modification, and/or to bind target nucleic acids (e.g., for visualization, for collecting and/or analyzing, etc.) in mitotic or post-mitotic cells in vivo and/or ex vivo and/or in vitro (e.g., to disrupt production of a protein encoded by a targeted mRNA). Because the guide RNA provides specificity by hybridizing to target nucleic acid, a mitotic and/or post-mitotic cell of interest in the disclosed methods may include a cell from any organism (e.g. a bacterial cell, an archaeal cell, a cell of a single-cell eukaryotic organism, a plant cell, an algal cell, e.g., Botryococcus braunii, Chlamydomonas reinhardtii, Nannochloropsis gaditana, Chlorella pyrenoidosa, Sargassum patens, C. agardh, and the like, a fungal cell (e.g., a yeast cell), an animal cell, a cell from an invertebrate animal (e.g. fruit fly, cnidarian, echinoderm, nematode, etc.), a cell from a vertebrate animal (e.g., fish, amphibian, reptile, bird, mammal), a cell from a mammal, a cell from a rodent, a cell from a human, etc.).

Introducing Components into a Target Cell

[0612] A Cas9 guide RNA (or a nucleic acid comprising a nucleotide sequence encoding same), and/or a Cas9 fusion polypeptide (or a nucleic acid comprising a nucleotide sequence encoding same) and/or a donor polynucleotide can be introduced into a host cell by any of a variety of well-known methods.

[0613] Methods of introducing a nucleic acid into a host cell are known in the art, and any known method can be used to introduce a nucleic acid (e.g., an expression construct) into a stem cell or progenitor cell. Suitable methods include, include e.g., viral or bacteriophage infection, transfection, conjugation, protoplast fusion, lipofection, electroporation, calcium phosphate precipitation, polyethyleneimine (PEI)-mediated transfection, DEAE-dextran mediated transfection, liposome-mediated transfection, particle gun technology, calcium phosphate precipitation, direct micro injection, nanoparticle-mediated nucleic acid delivery (see, e.g., Panyam et., al Adv Drug Deliv Rev. 2012 Sep. 13. pii: S0169-409X(12)00283-9. doi: 10.1016/j.addr.2012.09.023), and the like. Any or all of the components can be introduced into a cell as a composition (e.g., including any convenient combination of: a Cas9 fusion polypeptide, a Cas9 guide RNA, a dimerizing agent, a donor polynucleotide, etc.) using known methods, e.g., such as nucleofection.

### EXAMPLES

[0614] The following examples are put forth so as to provide those of ordinary skill in the art with a complete disclosure and description of how to make and use the present invention, and are not intended to limit the scope of what the inventors regard as their invention nor are they intended to represent that the experiments below are all or the only experiments performed. Efforts have been made to ensure accuracy with respect to numbers used (e.g. amounts, temperature, etc.) but some experimental errors and deviations should be accounted for. Unless indicated otherwise, parts are parts by weight, molecular weight is weight average molecular weight, temperature is in degrees Celsius, and pressure is at or near atmospheric. Standard abbreviations may be used, e.g., bp, base pair(s); kb, kilobase(s); pl, picoliter(s); s or sec, second(s); min, minute(s); h or hr, hour(s); aa, amino acid(s); kb, kilobase(s); bp, base pair(s); nt, nucleotide(s); i.m., intramuscular(ly); i.p., intraperitoneal(ly); s.c., subcutaneous(ly); and the like.

### Example 1: Materials and Methods

[0615] The following materials and methods were used throughout the Examples.

### Strains and Media

[0616] Escherichia coli MG1655, which have chromosomally integrated constitutive GFP and RFP expression, were used for in vivo screening, fluorescence measurements, and transformation assays. Cell transformation, plasmid maintenance, and verification of transformation were done as previously described using AmpR and CmR as selectable markers. EZ-rich defined growth medium (EZ-RDM, Teknoka) was used for in vivo fluorescence assays unless otherwise noted. Super optimal broth (S.O.B) medium was used for library outgrowth and screening. The arC9 ligands used (4-hydroxytamoxifen (4-HT), nafoxidine, beta-estradiol, and diethylstilbestrol) were all ordered from Sigma and resuspended in dimethyl sulfoxide (DMSO).

### Transposon Library Construction

[0617] A modified transposon containing an antibiotic resistance marker (S1) was inserted into pUC19 plasmid carrying dCas9 in an in vitro reaction. The coding sequence of dCas9 was subsequently excised via restriction digest, size-selected for successful transposon insertion, and cloned, using standard molecular biology procedures, into the expression plasmid pdCas9-bacteria (Addgene ID: 44249). A golden gate reaction was then used to remove the modified transposon and insert the domain of interest (PDZ, ER) in its place. No selection was used for this cloning step, but efficiencies of reaction were >99%. Completed libraries were transformed into E. coli using electroporation.

### Library Sequencing and Analysis

[0618] The open reading frame (ORF) coding for the Cas9 insertion constructs were excised from plasmids via restriction digestion and then sheared to ˜300 bp fragments for sequencing. All libraries were prepped with a NEBnext® DNA Library Prep Kit (New England Biolabs) and sequenced on Illumina platform sequencers (MySeq® and HiSeq®). Sequencing data was analyzed with a custom Python pipeline that is available online at http(colon)//github(dot)com/SavageLab/dipseq. In brief, reads were filtered to remove those that did not contain both Cas9 and sequence from the inserted domain (PDZ or estrogen receptor (ER)-ligand binding domain (LBD)). The inserted domain was then trimmed from the read and the remaining sequence was aligned to dCas9 to calculate the insertion site in nucleotides from the start codon. Linker sequences were extracted from the original sequence. The insertion site, linker length, and insert sequence were then used to calculate whether the insertion was in-frame and forward-oriented relative to dCas9. For such productive insertions, the amino acid (AA) insertion site was calculated as the carboxyl (C)-terminal most amino acid after which the amino (N)-terminus of the insert was detected. In this manner, it was ensured that reads catching the N- or C-terminal end of the insertion would result in the same calculated insertion site. This scheme was tested for correctness and recall by processing one million synthetic reads for each library. Each library was sequenced twice and reads identifying N- and C-terminal insertions for the same site were used as internal technical replicates, giving four technical replicates with which to calculate fold changes and associated p-values. Fold changes were calculated using the DESeq package, which uses a negative binomial model so as not to underestimate the dispersion of read counts at each site. All p-values reported were corrected for multiple hypothesis testing using the Benjamini-Hochberg procedure implemented by DESeq.

### Clustered Regularly Interspaced Short Palindromic Repeats Interference (CRISPRi) Screen and Fluorescence-Activated Cell Sorting Selection

[0619] Screening of the PDZ libraries was accomplished by transforming and screening at least >10 fold more E. coli than the theoretical library size and repeating two rounds of positive screening and fluorescence-activated cell sorting (FACS) selection. Screening for the ER library followed these same methods however the primary screen and FACS selection was for function with 4-HT, the secondary screen and FACS selection was against function without 4-HT, and the final screen was for function with 4-HT on plates. From these plates colonies were picked by eye (FIG. 7) for dCas9 based repression of RFP and tested in triplicate for RFP based repression after overnight growth in 2 μM anhydrotetracycline (aTc) and with and without 10 μM 4-HT in SOB media.

[0620] FIG. 7A-7C. CRISPRi screening protocol controls (FIG. 7A) Schematic of the E. coli screening platform for determining DNA-binding competent dCas9 insertion mutants. (FIG. 7B) Flow cytometry of the red fluorescent protein (RFP) repression by dCas9. A 20 fold change in RFP fluorescence when dCas9 was present for 6+ hours, similar to previously reported results reported. This provided a clear signal by which to select functional Cas9 insertion mutants (FIG. 7C) On-plate screening of RFP repression by dCas9. The lack of RFP signal was visible by eye when screening colonies after overnight growth on plates.

### CRISPRi Green Fluorescent Protein (GFP) Repression Assays

[0621] For individual PDZ-construct testing, colonies were cultured from plates, PDZ-dCas9 plasmid DNA recovered, separated from the RFP guide plasmid (pgRNA-bacteria Addgene ID: 44251) via restriction digestion with BsaI and co-transformed with a guide plasmid to repress chromosomal GFP. GFP repression for each construct was then tested in triplicate in a 96-well microplate reader (Tecan M1000) at 37° C. PDZ clones were grown with appropriate antibiotics, 0.2 nM aTc, dCas9, and inducer. OD_{600 nm} absorbance was measured for each well. GFP signal was measured, normalized for OD_{600 nm} and compared when the cultures were approaching saturation (80% of the maximum OD_{600 nm}) The arC9 construct was treated and assayed in the same fashion as above with induction using 2 M aTc. Fold changes for the effect of different ligands were calculated by normalizing the GFP/OD₆₀₀ of the arC9 construct to that of a vector control and dividing the fluorescent values without ligand by the fluorescent values with ligand treatment. For single cell analysis of arC9, cells were grown for ˜6 hours with antibiotics and inducer, washed with PBS, and assayed for GFP fluorescence using a Sony SH800 cell sorter.

### Transformation Assay

[0622] E. coli containing a sgRNA plasmid which targets the genome (either the chromosomal RFP or GFP) were made electrocompetent as described previously 10 and similar to previous work all tests were done with the same batch of electrocompetent cells to minimize transformation variability. E. coli with these self-targeting guides were electroporated with 9 fmol of either wtCas9, dCas9 plasmid, or a test construct plasmid (active PDZ-Cas9s, or arC9) in triplicate using a BTX Harvard Apparatus ECM 630 High Throughput Electroporation System. Cells were recovered in 1 mL SOB with catabolite repression (S.O.C.) medium post-electroporation for 1 hr. Colony forming unit (CFU)/mL was calculated by spotting 2 technical replicates of 10-fold serial dilutions onto plates containing antibiotics for both plasmids.

### Human Embryonic Kidney (HEK) 293T-Enhanced GFP (EGFP)-PEST Cell Line Creation

[0623] The d2EGFP reporter construct was created in a modified lentivirus backbone with EF1-a promoter driving the gene of interest and a second PGK promoter driving production of a gene which confers resistance to hygromycin. The EGFP is destabilized by fusion to residues 422-461 of mouse ornithine decarboxylase, giving an in vivo half-life of ˜2 hours. Transduced 293T cells were selected with hygromycin (250 μg/ml). d2EGFP clones were isolated by sorting single cells into 96-well plates and characterized by intensity of d2EGFP. Lentivirus was produced by polyethylenimine (PEI) (Polysciences Inc., 24765) transfection of 293T cells with gene delivery vector co-transfected with packaging vectors pspax2 and pMD2.G essentially as described previously.

### HEK 293T GFP Disruption Assay

[0624] GFP disruption assays were based on those previously described. Briefly, HEK cells were cultured in 10 cm dishes using Dulbecco's Modification of Eagle's Medium (DMEM) with 4.5 g/L glucose, L-glutamine, sodium pyruvate (Corning Cellgro®) plus 10% fetal bovine serum, 1×MEM Non-Essential Amino Acids Solution (Gibco®) and Pen-Strep (Gibco®). One day before transfection, ˜3×10\hat{ }4 cells were plated into each well of a 96-well plate with the DMEM medium plus hygromycin and allowed to settle. One hour before transfection the media was removed and replaced with media with ligand treatment or vehicle control. Cells were transfected with Lipofectamine® 2000 (Life Technologies) and plasmid DNA (FIGS. 13A and 13B) according to manufacturer's protocol. Cells were analyzed for EGFP and mCherry® expression at 48 or 72 hours post transfection using a BD LSR Fortessa® high-throughput sequencer. Transfected cells were gated positive based on mCherry® fluorescence and the percent EGFP disruption for three independent biological replicates was calculated from this gate (FIGS. 14A-14C).

[0625] FIG. 13A-13B. ArC9 Human Plasmid. (FIG. 13A) Schematic description of the human arC9 expression plasmid with the 2× nuclear localization signal (NLS), T2A cleavable linker and mCherry®. Plasmid is originally derived from a pX330 variant. (FIG. 13B) Schematic of the human arC9 expression plasmid without NLS.

[0626] FIG. 14A-14C. HEK 293T transfection optimization for arC9 expression levels. (FIG. 14A) Upon transfection of 75 ng of plasmid into the HEK293T cell line and measurement EGFP fluorescence via Flow cytometry at 48 hours it was observed that 2×NLS-Cas9 disrupted ˜70-80% of EGFP signal regardless of treatment condition. 2×NLS-arC9 also disrupted GFP signal but with only a 2 fold increase upon the addition of 4-HT (FIG. 14B). 4-HT-induced activation was seen at low levels of arC9-mCherry® expression, but higher levels of arC9-mCherry® expression caused GFP disruption regardless of ligand presence. Specifically, the mCherry® signal for the arC9 transfected cells—in which GFP was disrupted regardless of 4-HT treatment—was 8.5× greater than that of the non-disrupted cells. Therefore transfection conditions were optimized and the expression was reduced to levels similar to the ideal gates posed in (FIG. 14C) by lowering the plasmid transfection to 5 ng of DNA. This resulted in significantly less background activity while maintaining 4-HT activation (see FIG. 3B).

### Example 2: Mapping Domain Insertion Potential into Cas9 with the Alpha-Syntrophin PDZ Protein Interaction Domain

[0627] The plasticity of the Cas9 structure was profiled by examining its ability to tolerate a synthetic domain insertion while still retaining RNA-guided DNA binding activity. An unbiased Cas9 insertion library was created using randomized in vitro transposition (FIG. 1A). Briefly, an engineered Mu transposon possessing an antibacterial selection marker flanked by BsaI endonuclease sites was inserted randomly throughout a catalytically inactive Cas9 (dCas9)-containing plasmid by in vitro transposition (FIG. 1A, FIGS. 4A-4D). After selection and sub-cloning to isolate only those plasmids with transposition events inside of the Cas9 ORF, the library was characterized by deep sequencing. This analysis revealed that the library possessed good insertion coverage, with domain insertions at >70% of all possible amino acid (AA) sites in dCas9 observed at least once (FIGS. 5A and 5B). Once isolated, this naïve library was used to construct specific insertion libraries by cleavage with BsaI and re-ligation with DNA fragments containing an ORF of interest. (FIG. 1A, FIGS. 4A-4D).

[0628] FIG. 1A. Unbiased transposon-based domain insertion library creation.

[0629] FIG. 4A-4D. Construction of a transposition library (FIG. 4A) Schematic of the Mu transposon used for transposition. (FIG. 4B) Schematic areing the inserted transposon. (FIG. 4C) ORF excision of an intra-Cas9 transposon using Type II-S restriction enzyme BsaI. Any ORF can be subsequently ligated into these sticky ends. (FIG. 4D) Description of the sticky ends and linkers used to ligate in the PDZ and ER-LBD domains. Ala and Ser are hardcoded on each side providing the correct sticky ends for a Golden Gate ligation and additional diversity is provided by “BCT” codons (encoding Ala, Ser, or Pro). In total, there are 13 possible amino acid variations per terminus.

[0630] FIGS. 5A and 5B. Naïve transposon library sequencing. (FIG. 5A) Deep sequencing of the transposon library. Sequencing and alignment of the naïve transposon insertion library indicates coverage across the Cas9 coding sequence with a bias for insertion towards the C-terminus. (FIG. 5B) Cumulative distribution of the replicated insertion site data. 973 in-frame insertions covering 71% of all possible sites were observed. All read counts represent the corrected replicated averages generated from DESeq.

[0631] The alpha-1-syntrophin PDZ domain was chosen as a proof of concept insertion domain due to its small size (86 amino acids), well-folded nature, and adjacent N- and C-termini (FIG. 6A). It was hypothesized that this domain would be minimally perturbative and act as a molecular ‘potentiometer’—where the PDZ's capacity to insert is indicative of the absolute insertion potential of a given amino acid site within Cas9. Moreover, as the PDZs are known protein-protein interaction domains, PDZ-Cas9s identified here could further be used as protein scaffolds to recruit other domains for editing, epigenetic modification and activation/repression purposes (FIG. 6B).

[0632] FIGS. 6A and 6B. The PDZ domain as a potential scaffolding element (FIG. 6A) The Alpha-Syntrophin PDZ protein interaction domain. The adjacent N- and C-termini and its peptide ligand are depicted (Protein Data Bank (PDB) ID: 2PDZ) (FIG. 6B) PDZ based recruitment. The PDZ domain is a protein interaction domain that specifically recognizes a seven amino acid C-terminal motif that can be modularly attached to any protein of interest. This provides a mechanism by which it is possible to recruit one or many different proteins to a cleavage site or binding site to increase the local concentration. This will allow for the recruitment of proteins that may be processive, DNA or epigenetic modifying enzymes, activators or repressor, and even libraries of protein domains fused to the PDZ recruitment amino acid sequence.

[0633] The PDZ domain possessing flanking amino acid linkers was cloned into the naïve library (FIGS. 4A-4D) and passaged through two rounds of a CRISPRi screen. Briefly, cells expressing Red Fluorescent Protein (RFP) and Green Fluorescent Protein (GFP) were assayed using fluorescence activated cell-sorting (FACS) to identify Cas9 variants capable of repressing RFP in a single guide RNA (sgRNA)-dependent fashion (FIGS. 7A-7C). After sorting, the Cas9 libraries were subjected to deep sequencing to identify insertion sites. Comparison of the pre- and post-screen libraries demonstrated that the screen increased the fraction of in-frame insertions by ˜20 fold (FIG. 8A). Such insertions are referred to as ‘productive’ because they can produce a full-length insertion protein. Tracking individual clones revealed that non-productive insertions are often cleared from the library (FIG. 8B). Thus, the screen enriched productive PDZ-dCas9 insertion mutants.

[0634] FIGS. 8A and 8B. Domain insertion profiling of the PDZ-insertion library (FIG. 8A) Screening-based enrichment of functional Cas9 clones. Passage of the PDZ insertion library through a round of selection increased the number of in-frame, forward insertions (‘productive’) sequenced. Thus the CRISPRi based screen enriched full length coding proteins. Error bars represent standard deviation of four technical replicates. (FIG. 8B) Trajectories of representative insertion site clones. Out of frame and reverse insertions were observed to be eliminated from the library.

[0635] Calculation of the log 2-fold enrichment of insertion sites between the final and unscreened PDZ insertion library revealed statistically significant changes for roughly half of the amino acid (AA) sites in Cas9 (FIG. 1B, FIG. 15, Table 1 in FIGS. 19A-19C). Domain insertions at the majority of residues within dCas9 are strongly selected against, with the bulk of clones falling out of the pool by the second round of screening. Sites with negative fold changes were highly overrepresented in critical motifs such as the core of Cas9, sgRNA-binding grooves, the bridge helix, the PAM-binding pocket and the DNA:RNA heteroduplex recognition channel (FIG. 1C, FIGS. 9A and 9B). Nevertheless, small local clusters of amino acids that are tolerant to insertions were found and a total of 176 statistically significant (p<0.1) sites enriched ≥2-fold were recovered (FIG. 1B, FIG. 1C). When mapped onto the holo Cas9-DNA-RNA crystal structure 11, the enriched insertion sites tended to cluster in discrete regions, often around flexible loops, the ends of helices, and at solvent-exposed residues. Specifically, hotspots were found in an abundance of Cas9's domains: at six distinct clusters within the alpha helical (RNA recognition) lobe, the linker between the alpha helical and nuclease lobes, the HNH domain, three extended sites in the RuvCIII region and throughout the PAM interacting (C-Terminal) domain (FIG. 1C, FIGS. 10A and 10B). These insertion sites provide unprecedented access to both 5′ and 3′ ends of the bound DNA (˜10 Å) as well as the groove hypothesized to hold the non-targeted DNA strand. Thus, these insertions open the door for much closer and specific interactions with bound DNA. Intriguingly, a number of tolerated insertions in alpha helices and beta sheets was found to be concentrated around the PAM interacting domain (i.e. AA 1291, 1260, 1196, 1267, 1064, 1161, 1148). The insertions presumably disrupt these secondary structures but have little impact on binding function.

[0636] FIGS. 1B and 1C. (FIG. 1B) Fold change values for insertions at specific amino acid sites after two rounds of screening. Positive values represent a preference for domain insertion at the site to remain in the library after screening for function. Negative values indicate a loss of clones with an insertion at the site. More significant P values are represented as darker color bars. Dashed bars represent sites that were not sequenced before screening. Negative bars that reach 10³ represent clones which have been cleared from the library (i.e. not observed after selection). (FIG. 1C) Log₂ fold change values mapped onto the structure of Cas9 (PDB ID:4UN3).

[0637] FIG. 15. Validation of PDZ Domain Insertions for dCas9 based repression of GFP in E. coli. Individual dCas9-PDZ insertion clones were recovered and tested for repression of GFP in comparison to wild-type (wt) dCas9 and a negative control. Most are wt levels of repression.

[0638] FIG. 9A-9B. PDZ-insertion sites avoid critical structural motifs. (FIG. 9A) Mapping the log₂ fold change of the PDZ-insertions onto the RNA:DNA holo Cas9 crystal structure (PDB ID: 4UN3) demonstrates how the unbiased insertion technique can experimentally delineate regions of critical structure and function. The PAM binding pocket (PAM residues in yellow) and the RNA:DNA channel are selected against. (FIG. 9B) PDZ insertions are not readily observed in core packing regions of the RuvC and RecI domains and are also selected against in the sgRNA binding grooves (FIG. 1C) and bridge helix.

[0639] FIGS. 10A and 10B. Mapping enriched PDZ-insertion sites (FIG. 10A) Mapping the enriched insertions sites onto a RNA:DNA bound Cas9 crystal structure (PDB ID: 4UN3). Sites enriched by at least two-fold are indicated. Domains are indicated in the primary sequence bar. (FIG. 10B) Enriched sites with the degree of saturation mapped to fold change in the profiling. Many sites with high fold-change mapped to amino acids that are unresolved in the crystal structures and are presumably in unstructured loops.

[0640] In order to confirm the binding activity of dCas9 proteins with PDZ domain insertions, plasmid DNA for individual clones was isolated and used to transform E. coli together with a GFP-targeting sgRNA-expression plasmid. When cells were tested for GFP repression, effective repression was found to correspond well with the calculated fold change of the insertion site, where highly enriched clones perform as well as wild-type (WT) dCas9 (FIG. 1D). To determine whether the PDZ-Cas9 clones still possessed nuclease activity, the catalytic residues (D10 & H840) were reintroduced and tested in an E. coli based transformation assay. In this assay, effective DNA cutting leads to genomic cleavage and cell death. Once again, cleavage activity correlated with fold change, and the most highly enriched PDZ-Cas9 clones maintained WT Cas9 levels of cleavage-induced cell death (FIG. 1E). This striking result demonstrated that it is possible to insert an entire exogenous domain at numerous sites within Cas9's primary sequence while maintaining native activity levels.

[0641] FIGS. 1D and 1E. (FIG. 1D) GFP repression activity of individual PDZ insertion sites. Values represent biological triplicates with standard deviation, constructs are in order of decreasing fold change. (FIG. 1E) Cleavage activity of clones via an E. coli based transformation assay. Cas9 activity results in genomic cleavage and lower CFU/mL.

### Example 3: Creation of a Switch-Like Cas9 Though Insertion of the Estrogen Receptor Ligand Binding Domain

[0642] Whether unbiased domain insertion profiling could be used to reveal sites in Cas9 amenable to allosteric coupling was explored. As a proof of concept, the well-studied Estrogen Receptor a Ligand Binding Domain (ER-LBD; residues 302-552 of ERα) was chosen. Based on crystallographic data, this domain is known to adopt distinct conformations dependent on ligand binding; the antagonist-bound conformation places the N- and C-termini of ER-LBD substantially closer together (˜20 Å) than either the apo or agonist-ligand bound forms (FIG. 11). This conformational switch serves as a mechanism by which an allosteric signal can be transduced.

[0643] FIG. 11. Conformations of the estrogen receptor alpha ligand binding domain (ER-LBD). Conformations of the ER-LBD. Crystal structures of the apo, 17-beta-estradiol and 4-hydoxytamoxifen-bound ER-LBD (PDB ID's:1A52, 1GWR, 3ERT respectively) clearly demonstrate the range of conformational change this domain can undergo. The ‘hormone arm,’ or helix 12, places the N- and C-termini up to 63 Å apart in the apo form, 37 Å in the agonist bound form (β-E), and 20 Å in the antagonist bound structure.

[0644] In order to create an allosterically-regulated Cas9 (arC9), the ER-LBD was introduced into the naïve dCas9 domain insertion library in the manner previously described and passaged through a modified version of the RFP CRISPRi-based assay. Briefly, a positive screen in the presence of ligand 4-hydroxytamoxifen (4-HT) was carried out, followed by a negative screen for loss of activity in the absence of ligand (FIG. 2A). Clones were recovered by plating, re-transformed with sgRNA targeting GFP, and assayed for repression in E. coli. An insertion site at AA 231 that demonstrated a 4-HT-dependent decrease in GFP fluorescence was identified, indicating switch-like behavior (FIG. 12, FIG. 16). Notably, this site was also enriched during the PDZ screen (Table 1 in FIGS. 19A-19C).

[0645] FIG. 2A. Schematic of the screen/counter-screen procedure to select for ligand responsive ER-Cas9 insertions.

[0646] FIG. 12. arC9 Hit. Depiction of the recovered ER-LBD insertion site at amino acid Gly231 (PDB ID: 4UN3).

[0647] FIG. 16. Allosteric response to 4-Hydroxytamoxifen (4-HT) of ER-LBD domain insertions. ER-LBD was found to regulate dCas9 based GFP repression by domain insertion into identified sites 199-200, 230-231 and 1249-1250.

[0648] Insertion of ER-LBD at Gly231 (arC9:231) was first characterized in E. coli. ArC9:231 exhibited 4-HT dose-dependent repression of GFP with a ˜10 fold change in activity in ensemble and single cell experiments (FIGS. 2B and 2C). Therefore arC9 represented a tunable CRISPRi effector. As hypothesized, arC9 also exhibited clear ligand discrimination. CRISPRi-based GFP repression increased only with ligands that encourage the ER-LBD to enter an antagonist conformation (4-HT and nafoxidine) as opposed to ligands encouraging the agonist conformation, beta-estradiol and diethylstilbestrol (FIG. 2D). This further supported the argument that the ER-LBD insertion at AA 231 was able to transduce the specific binding of 4-HT, the antagonist ER-LBD conformation, into Cas9 activity. To determine if arC9:231 also exhibited allosteric control over cleavage activity, the catalytic residues were reintroduced (D10 & H840) and tested in the E. coli transformation assay (FIG. 2E, FIG. 17). arC9 increased chromosomal cleavage-based E. coli cell death at least 100-fold more in the presence of 4-HT ligand than with DMSO vehicle control (p value<0.01), indicating that allosteric modulation of arC9 also extends to cleavage activity.

[0649] FIG. 2B-2E. (FIG. 2B) Dose-response curve to 4-HT. ArC9:231 has an IC₅₀ of 440±70 nM (S.D) and a Hill coefficient of 1.04 as expected for the non-cooperative binding of 4-HT to ER-LBD. (FIG. 2C) Single cell analysis of arC9:231 binding in response to increasing concentrations of 4-HT. Flow cytometry data agrees well with ensemble data demonstrating a >9 fold switch between arC9 plus and minus 4-HT (arC9 GFP signal without 4-HT mean: 24,310 (au) and with 100 μM 4-HT: 2,631 (au). (FIG. 2D) Dose response of arC9:231 binding to various ligands (B-E and DES are beta-estradiol & diethylstilbestrol). Response is normalized to vector control fluorescence under the same conditions and testing was done in SOB media. ArC9 only responds to ligands which bind to the ER-LBD in the antagonist conformation (see FIG. 11). (FIG. 2E) Switching of arC9:231 cleavage activity.

[0650] FIG. 17. Cleavage response of Allosteric ER-Cas9 231 to 4HT and Temperature in E. coli. Allosteric ER-Cas9 231 increases its cleavage of the genome leading to death in E. coli killing 10\hat{ }3 more CFU in the presence of 4-HT or a lower temperature.

### Example 4: Testing arC9 in Eukaryotic Cells

[0651] arC9:231 function was tested in eukaryotic cells. Cas9 and arC9:231 constructs flanked by nuclear localization sequences (NLS) were transfected into a Human Embryonic Kidney (HEK293T) cell line possessing lentiviral integrated EGFP-PEST and assayed for GFP disruption (FIG. 3A, FIGS. 13A and 13B). After 72 hours, Cas9 was found to disrupt 91% of the EGFP signal regardless of treatment condition (FIG. 3B, FIGS. 14A-14C). A 6-fold induction of arC9-mediated GFP disruption upon the addition of 4-HT (10.9±0.5% to 66±1%) (FIG. 3B) was observed over this time period. Higher expression conditions led to an increase of GFP disruption even in the absence of 4-HT (FIGS. 14A-14C).

[0652] FIGS. 3A and 3B. (FIG. 3A) Schematic of the arC9:231 expression constructs and GFP disruption assay. (FIG. 3B) Quantification of EGFP disruption at 72 hours for Cas9 and arC9 with a N- and C-terminal nuclear localization signal (NLS) in triplicate. These data demonstrate a ˜6 fold increase in EGFP disruption. Background activity of arC9 is 10.9±0.5% (S.D.) while EGFP disruption in the presence of 300 nM 4-HT increases to 66±1% (S.D.) Error bars represent one standard deviation of biological replicates. Transfection used five ng of plasmid DNA.

[0653] FIGS. 13A and 13B. ArC9 Human Plasmid. (FIG. 13A) Schematic description of the human arC9 expression plasmid with the 2×NLS (yellow) T2A cleavable linker and mCherry. Plasmid is originally derived from a pX330 variant. (FIG. 13B) Schematic of the human arC9 expression plasmid without NLS.

[0654] Therefore, the known ligand-dependent nuclear localization activity of ER-LBD was used in conjunction with the allosteric regulation of arC927. By removing the NLS from the arC9 construct it was possible to reduce its activity without 4-HT to background levels, while still maintaining robust activity with 4-HT. A dose-dependent response and maximum 24-fold increase in EGFP disruption in the presence of 300 nM 4-HT was observed (FIGS. 3C, D). The lack of background activity for arC9 suggests a strategy for reducing undesired cleavage by Cas9 because under all conditions WT Cas9 EGFP disruption activity remained >70% even without an NLS (FIG. 3C). Finally, a model to explain the dual dependence of arC9 activity on expression level and 4-HT was developed (FIG. 16). ArC9 clearly functioned as a 4-HT inducible nuclease in human cells, demonstrating that unbiased domain insertion can be used to engineer new functionalities into Cas9.

[0655] FIGS. 3C and 3D. (FIG. 3C) Quantification EGFP disruption at 72 hours for Cas9 and arC9 without an NLS. Background activity of arC9 is not significantly different from a non-targeting negative control. EGFP disruption in the presence of 4-HT increases to 30±2% (S.D.) this represents at least a 24-fold increase in arC9 activity in the presence of 300 nM 4-HT. Transfection used 50 ng of plasmid DNA (*** p values <0.001). (FIG. 3D) Dose response of arC9 w/o NLS normalized to maximum activity. IC50 is 1.0±0.2 nM (S.D).

[0656] While the present invention has been described with reference to the specific embodiments thereof, it should be understood by those skilled in the art that various changes may be made and equivalents may be substituted without departing from the true spirit and scope of the invention. In addition, many modifications may be made to adapt a particular situation, material, composition of matter, process, process step or steps, to the objective, spirit and scope of the present invention. All such modifications are intended to be within the scope of the claims appended hereto.

1. A Cas9 fusion polypeptide comprising:
(a) a Cas9 polypeptide; and
(b) a heterologous amino acid or heterologous polypeptide inserted internally within the Cas9 polypeptide,
wherein the heterologous amino acid or heterologous polypeptide is inserted at a position that is immediately adjacent and C-terminal, or that is immediately adjacent and N-terminal, to an amino acid residue corresponding to a residue selected from 3, 4, 42, 112, 127, 193, 197, 202, 204, 205, 206, 207, 208, 209, 211, 214, 217, 228, 231, 238, 257, 259, 313, 390, 456, 460, 467, 468, 470, 474, 532, 533, 536, 576, 577, 579, 588, 639, 641, 645, 647, 687, 689, 690, 692, 713, 715, 717, 719, 721, 724, 798, 801, 802, 804, 834, 868, 890, 940, 941, 944, 947, 952, 1010, 1011, 1012, 1015, 1016, 1022, 1026, 1027, 1031, 1034, 1046, 1047, 1049, 1050, 1051, 1052, 1053, 1054, 1056, 1058, 1061, 1062, 1063, 1064, 1065, 1068, 1070, 1071, 1073, 1145, 1148, 1149, 1152, 1153, 1155, 1156, 1160, 1161, 1175, 1179, 1183, 1186, 1188, 1189, 1190, 1191, 1193, 1194, 1195, 1196, 1197, 1204, 1205, 1206, 1207, 1212, 1213, 1228, 1229, 1230, 1233, 1234, 1237, 1238, 1239, 1240, 1242, 1243, 1244, 1246, 1247, 1248, 1250, 1251, 1252, 1253, 1255, 1259, 1260, 1262, 1267, 1268, 1269, 1270, 1281, 1282, 1283, 1284, 1287, 1289, 1291, 1292, 1293, 1294, 1295, 1296, 1298, 1299, 1300, 1302, 1304, 1306, 1307, 1344, 1346, 1347, 1348, 1360, 1363, 1366, and 1367, of the Cas9 protein set forth in SEQ ID NO: 5, and
wherein the Cas9 fusion polypeptide retains cleavage and/or binding activity relative to the activity of the Cas9 polypeptide without the inserted heterologous amino acid or heterologous polypeptide.

2. The Cas9 fusion polypeptide of claim 1, wherein the Cas9 fusion polypeptide retains binding and cleavage activity relative to the binding and cleavage activity of the Cas9 polypeptide without the inserted heterologous amino acid or heterologous polypeptide.

3. The Cas9 fusion polypeptide of claim 1, wherein the heterologous amino acid or heterologous polypeptide is inserted at a position that is immediately adjacent and C-terminal, or that is immediately adjacent and N-terminal, to an amino acid residue corresponding to a residue selected from 1244, 202, 208, 468, 1058, 209, 211, 1052, 204, 1027, 588, 238, 1071, 228, 460, 804, 802, 193, 1156, 1243, 1287, 1064, 4, and 1191, of the Cas9 protein set forth in SEQ ID NO: 5.

4. The Cas9 fusion polypeptide of claim 1, wherein the heterologous amino acid or heterologous polypeptide is inserted at a position that is immediately adjacent and C-terminal, or that is immediately adjacent and N-terminal, to an amino acid residue corresponding to a residue selected from 1244, 202, 208, 468, 1058, 209, 211, 1052, 204, and 1027, of the Cas9 protein set forth in SEQ ID NO: 5.

5. The Cas9 fusion polypeptide of claim 1, wherein the heterologous amino acid or heterologous polypeptide is inserted in a RuvC domain at a position that is immediately adjacent and C-terminal, or that is immediately adjacent and N-terminal, to an amino acid residue corresponding to a residue selected from 3, 4, 42, 719, 721, 724, 940, 941, 944, 947, 952, 1010, 1011, 1012, 1015, 1016, 1022, 1026, 1027, 1031, 1034, 1046, 1047, 1049, 1050, 1051, 1052, 1053, 1054, 1056, 1058, 1061, 1062, 1063, 1064, 1065, 1068, 1070, 1071, and 1073 of the Cas9 protein set forth in SEQ ID NO: 5.

6. The Cas9 fusion polypeptide of claim 1, wherein the heterologous amino acid or heterologous polypeptide is inserted in an alpha helical RNA recognition lobe at a position that is immediately adjacent and C-terminal, or that is immediately adjacent and N-terminal, to an amino acid residue corresponding to a residue selected from 112, 127, 193, 197, 202, 204, 205, 206, 207, 208, 209, 211, 214, 217, 228, 231, 238, 257, 259, 313, 390, 456, 460, 467, 468, 470, 474, 532, 533, 536, 576, 577, 579, 588, 639, 641, 645, 647, 687, 689, 690, 692, and 713, of the Cas9 protein set forth in SEQ ID NO: 5.

7. The Cas9 fusion polypeptide of claim 1, wherein the heterologous amino acid or heterologous polypeptide is inserted in a linker that is between the alpha helical and nuclease lobes at a position that is immediately adjacent and C-terminal, or that is immediately adjacent and N-terminal, to an amino acid residue corresponding to a residue selected from 715 and 717, of the Cas9 protein set forth in SEQ ID NO: 5.

8. The Cas9 fusion polypeptide of claim 1, wherein the heterologous amino acid or heterologous polypeptide is inserted in an HNH domain at a position that is immediately adjacent and C-terminal, or that is immediately adjacent and N-terminal, to an amino acid residue corresponding to a residue selected from 798, 801, 802, 804, 834, 868, and 890, of the Cas9 protein set forth in SEQ ID NO: 5.

9. The Cas9 fusion polypeptide of claim 1, wherein the heterologous amino acid or heterologous polypeptide is inserted in a PAM interacting domain at a position that is immediately adjacent and C-terminal, or that is immediately adjacent and N-terminal, to an amino acid residue corresponding to a residue selected from 1145, 1148, 1149, 1152, 1153, 1155, 1156, 1160, 1161, 1175, 1179, 1183, 1186, 1188, 1189, 1190, 1191, 1193, 1194, 1195, 1196, 1197, 1204, 1205, 1206, 1207, 1212, 1213, 1228, 1229, 1230, 1233, 1234, 1237, 1238, 1239, 1240, 1242, 1243, 1244, 1246, 1247, 1248, 1250, 1251, 1252, 1253, 1255, 1259, 1260, 1262, 1267, 1268, 1269, 1270, 1281, 1282, 1283, 1284, 1287, 1289, 1291, 1292, 1293, 1294, 1295, 1296, 1298, 1299, 1300, 1302, 1304, 1306, 1307, 1344, 1346, 1347, 1348, 1360, 1363, 1366, and 1367, of the Cas9 protein set forth in SEQ ID NO: 5.

10. The Cas9 fusion polypeptide of claim 1, wherein the heterologous amino acid or heterologous polypeptide is inserted within a region of secondary structure at a position that is immediately adjacent and C-terminal, or that is immediately adjacent and N-terminal, to an amino acid residue corresponding to a residue selected from: 42, 127, 193, 195, 208, 209, 211, 214, 238, 390, 639, 641, 645, 647, 721, 722, 724, 802, 804, 1034, 1063, 1064, 1065, 1148, 1149, 1150, 1175, 1179, 1183, 1197, 1204, 1212, 1213, 1255, 1259, 1260, 1262, 1267, 1268, 1269, 1270, 1286, 1287, 1289, 1291, 1292, 1293, 1294, 1295, 1296, 1306, 1307, 1347, and 1348, of the Cas9 protein set forth in SEQ ID NO: 5.

11. The Cas9 fusion polypeptide of claim 1, wherein the heterologous polypeptide is inserted internally within the Cas9 polypeptide.

12. The Cas9 fusion polypeptide of claim 11, comprising a heterologous polypeptide inserted at a position that is immediately adjacent and C-terminal, or that is immediately adjacent and N-terminal, to an amino acid residue corresponding to residue 231 of the Cas9 protein set forth in SEQ ID NO: 5.

13. The Cas9 fusion polypeptide of claim 1, wherein the heterologous polypeptide confers an inducible conformational change on the Cas9 fusion polypeptide.

14. The Cas9 fusion polypeptide of claim 13, wherein the heterologous polypeptide is an estrogen receptor alpha ligand binding domain (ER-LBD).

15.-20. (canceled)

21. A cell comprising the Cas9 fusion polypeptide of claim 1.

22.-26. (canceled)

27. A nucleic acid comprising a nucleotide sequence that encodes the Cas9 fusion polypeptide of claim 1.

28.-31. (canceled)

32. A cell comprising the nucleic acid of claim 27.

33.-37. (canceled)

38. A method of binding a target nucleic acid, comprising:
contacting a target nucleic acid with: (i) a Cas9 fusion polypeptide of claim 1, and (ii) a Cas9 guide RNA.

39. The method of claim 38, wherein said contacting comprises introducing into a cell: i) a DNA or RNA encoding the Cas9 fusion polypeptide; ii) a DNA encoding the Cas9 guide RNA: or iii) a combination thereof.

40.-41. (canceled)

42. The method of claim 38, wherein the Cas9 fusion polypeptide modulates transcription from the target nucleic acid, modifies the target nucleic acid, or cleaves the target nucleic acid.

43.-45. (canceled)

46. The method of claim 38, wherein the method further comprises contacting the target nucleic acid with a donor template polynucleotide.

47. (canceled)

The application's sequence listing, which the Patent Office published only in electronic form, follows.

SEQUENCE LISTING (1189 sequences)

SEQ ID NO: 1 - protein, 15 aa, artificial sequence
  Synthetic sequence
IGLDIGTNSVGWAVI

SEQ ID NO: 2 - protein, 8 aa, artificial sequence
  Synthetic sequence
IVIEMARE

SEQ ID NO: 3 - protein, 27 aa, artificial sequence
  Synthetic sequence
DVDHIVPQSFLKDDSIDNKVLTRSDKN

SEQ ID NO: 4 - protein, 8 aa, artificial sequence
  Synthetic sequence
HHAHDAYL

SEQ ID NO: 5 - protein, 1368 aa, Streptococcus pyogenes [sequence omitted]

SEQ ID NO: 6 - protein, 1367 aa, Streptococcus pyogenes
MDKKYSIGLDIGTNSVGWAVITDDYKVPSKKLKVLGNTDRHGIKKNLIGALLFDSGETAEATRLKRTARRRYTRRKNRICYLQEIFSNEMAKVDDSFFHRLEESFLVEEDKKHERHPIFGNIVDEVAYHEKYPTIYHLRKKLADSTDKVDLRLIYLALAHMIKFRGHFLIEGDLNPDNSDVDKLFIQLVQTYNQLFEENPINASRVDAKAILSARLSKSRRLENLIAQLPGEKKNGLFGNLIALSLGLTPNFKSNFDLAEDAKLQLSKDTYDDDLDNLLAQIGDQYADLFLAAKNLSDAILLSDILRVNSEITKAPLSASMIKRYDEHHQDLTLLKALVRQQLPEKYKEIFFDQSKNGYAGYIDGGASQEEFYKFIKPILEKMDGTEELLAKLNREDLLRKQRTFDNGSIPYQIHLGELHAILRRQEDFYPFLKDNREKIEKILTFRIPYYVGPLARGNSRFAWMTRKSEETITPWNFEEVVDKGASAQSFIERMTNFDKNLPNEKVLPKHSLLYEYFTVYNELTKVKYVTEGMRKPAFLSGEQKKAIVDLLFKTNRKVTVKQLKEDYFKKIECFDSVEISGVEDRFNTSLGTYHDLLKIIKDKDFLDNEENEDILEDIVLTLTLFEDKEMIEERLKKYANLFDDKVMKQLKRRHYTGWGRLSRKLINGIRDKQSGKTILDFLKSDGFANRNFMQLINDDSLTFKEAIQKAQVSGQGHSLHEQIANLAGSPAIKKGILQTVKIVDELVKVMGHKPENIVIEMARENQTTQKGQKNSRERMKRIEEGIKELGSQILKEHPVENTQLQNEKLYLYYLQNGRDMYVDQELDINRLSDYDVDHIVPQSFLKDDSIDNKVLTRSDKNRGKSDNVPSEEVVKKMKNYWRQLLNAKLITQRKFDNLTKAERGGLSELDKAGFIKRQLVETRQITKHVAQILDSRMNTKYDENDKLIREVKVITLKSKLVSDFRKDFQFYKVREINNYHHAHDAYLNAVVGTALIKKYPKLESEFVYGDYKVYDVRKMIAKSEQEIGKATAKYFFYSNIMNFFKTEITLANGEIRKRPLIETNGETGEIVWDKGRDFATVRKVLSMPQVNIVKKTEVQTGGFSKESILPKRNSDKLIARKKDWDPKKYGGFDSPTVAYSVLVVAKVEKGKSKKLKSVKELLGITIMERSSFEKNPIDFLEAKGYKEVRKDLIIKLPKYSLFELENGRKRMLASAGELQKGNELALPSKYVNFLYLASHYEKLKGSPEDNEQKQLFVEQHKHYLDEIIEQISEFSKRVILADANLDKVLSAYNKHRDKPIREQAKNIIHLFTLTNLGAPAAFKYFDTTIERNRYKSIKEVLDATLIHQSITGLYEIRIDLSQLGGD

SEQ ID NO: 7 - protein, 1056 aa, Pasteurella multocida
MQTTNLSYILGLDLGIASVGWAVVEINENEDPIGLIDVGVRIFERAEVPKTGESLALSRRLARSTRRLIRRRAHRLLLAKRFLKREGILSTIDLEKGLPNQAWELRVAGLERRLSAIEWGAVLLHLIKHRGYLSKRKNESQTNNKELGALLSGVAQNHQLLQSDDYRTPAELALKKFAKEEGHIRNQRGAYTHTFNRLDLLAELNLLFAQQHQFGNPHCKEHIQQYMTELLMWQKPALSGEAILKMLGKCTHEKNEFKAAKHTYSAERFVWLTKLNNLRILEDGAERALNEEERQLLINHPYEKSKLTYAQVRKLLGLSEQAIFKHLRYSKENAESATFMELKAWHAIRKALENQGLKDTWQDLAKKPDLLDEIGTAFSLYKTDEDIQQYLTNKVPNSVINALLVSLNFDKFIELSLKSLRKILPLMEQGKRYDQACREIYGHHYGEANQKTSQLLPAIPAQEIRNPVVLRTLSQARKVINAIIRQYGSPARVHIETGRELGKSFKERREIQKQQEDNRTKRESAVQKFKELFSDFSSEPKSKDILKFRLYEQQHGKCLYSGKEINIHRLNEKGYVEIDHALPFSRTWDDSFNNKVLVLASENQNKGNQTPYEWLQGKINSERWKNFVALVLGSQCSAAKKQRLLTQVIDDNKFIDRNLNDTRYIARFLSNYIQENLLLVGKNKKNVFTPNGQITALLRSRWGLIKARENNNRHHALDAIVVACATPSMQQKITRFIRFKEVHPYKIENRYEMVDQESGEIISPHFPEPWAYFRQEVNIRVFDNHPDTVLKEMLPDRPQANHQFVQPLFVSRAPTRKMSGQGHMETIKSAKRLAEGISVLRIPLTQLKPNLLENMVNKEREPALYAGLKARLAEFNQDPAKAFATPFYKQGGQQVKAIRVEQVQKSGVLVRENNGVADNASIVRTDVFIKNNKFFLVPIYTWQVAKGILPNKAIVAHKNEDEWEEMDEGAKFKFSLFPNDLVELKTKKEYFFGYYIGLDRATGNISLKEHDGEISKGKDGVYRVGVKLALSFEKYQVDELGKNRQICRPQQRQPVR

SEQ ID NO: 8 - protein, 1368 aa, Streptococcus pyogenes
MDKKYSIGLDIGTNSVGWAVITDDYKVPSKKLKGLGNTDRHGIKKNLIGALLFDSGETAEATRLKRTARRRYTRRKNRICYLQEIFSNEMAKVDDSFFHRLEESFLVEEDKKHERHPIFGNIVDEVAYHEKYPTIYHLRKKLADSTDKVDLRLIYLALAHMIKFRGHFLIEGDLNPDNSDVDKLFIQLVQTYNQLFEENPINASRVDAKAILSARLSKSRRLENLIAQLPGEKKNGLFGNLIALSLGLTPNFKSNFDLAEDAKLQLSKDTYDDDLDNLLAQIGDQYADLFLAAKNLSDATLLSDILRVNSEITKAPLSASMIKRYDEHHQDLTLLKALVRQQLPEKYKEIFFDQSKNGYAGYIDGGASQEEFYKFIKPILEKMDGTEELLAKLNREDLLRKQRTFDNGSIPYQIHLGELHAILRRQEDFYPFLKDNREKIEKILTFRIPYYVGPLARGNSRFAWMTRKSEETITPWNFEEVVDKGASAQSFIERMTNFDKNLPNEKVLPKHSLLYEYFTVYNELTKVKYVTEGMRKPAFLSGEQKKAIVDLLFKTNRKVTVKQLKEDYFKKIECFDSVEISGVEDRFNASLGTYHDLLKIIKDKDFLDNEENEDILEDIVLTLTLFEDREMIEERLKTYAHLFDDKVMKQLKRRRYTGWGRLSRKLINGIRDKQSGKTILDFLKSDGFANRNFMQLIHDDSLTFKEDIQKAQVSGQGDSLHEHIANLAGSPAIKKGILQTVKVVDELVKVMGRHKPENIVIEMARENQTTQKGQKNSRERMKRIEEGIKELGSDILKEYPVENTQLQNEKLYLYYLQNGRDMYVDQELDINRLSDYDVDHIVPQSFLKDDSIDNKVLTRSDKNRGKSDNVPSEEVVKKMKNYWRQLLNAKLITQRKFDNLTKAERGGLSELDKVGFIKRQLVETRQITKHVAQILDSRMNTKYDENDKLIREVRVITLKSKLVSDFRKDFQFYKVREINNYHHAHDAYLNAVVGTALIKKYPKLESEFVYGDYKVYDVRKMIAKSEQEIGKATAKYFFYSNIMNFFKTEITLANGEIRKRPLIETNGETGEIVWDKGRDFATVRKVLSMPQVNIVKKTEVQTGGFSKESILPKRNSDKLIARKKDWDPKKYGGFDSPTVAYSVLVVAKVEKGKSKKLKSVKELLGITIMERSSFEKDPIDFLEAKGYKEVRKDLIIKLPKYSLFELENGRKRMLASAGELQKGNELALPSKYVNFLYLASHYEKLKGSPEDNEQKQLFVEQHKHYLDEIIEQISEFSKRVILADANLDKVLSAYNKHRDKPIREQAENIIHLFTLTNLGAPAAFKYFDTTIDRKRYTSTKEVLDATLIHQSITGLYETRIDLSQLGGD

SEQ ID NO: 9 - protein, 1334 aa, Listeria innocua
MKKPYTIGLDIGTNSVGWAVLTDQYDLVKRKMKIAGDSEKKQIKKNFWGVRLFDEGQTAADRRMARTARRRIERRRNRISYLQGIFAEEMSKTDANFFCRLSDSFYVDNEKRNSRHPFFATIEEEVEYHKNYPTIYHLREELVNSSEKADLRLVYLALAHIIKYRGNFLIEGALDTQNTSVDGIYKQFIQTYNQVFASGIEDGSLKKLEDNKDVAKILVEKVTRKEKLERILKLYPGEKSAGMFAQFISLIVGSKGNFQKPFDLIEKSDIECAKDSYEEDLESLLALIGDEYAELFVAAKNAYSAVVLSSIITVAETETNAKLSASMIERFDTHEEDLGELKAFIKLHLPKHYEEIFSNTEKHGYAGYIDGKTKQADFYKYMKMTLENIEGADYFIAKIEKENFLRKQRTFDNGAIPHQLHLEELEAILHQQAKYYPFLKENYDKIKSLVTFRIPYFVGPLANGQSEFAWLTRKADGEIRPWNIEEKVDFGKSAVDFIEKMTNKDTYLPKENVLPKHSLCYQKYLVYNELTKVRYINDQGKTSYFSGQEKEQIFNDLFKQKRKVKKKDLELFLRNMSHVESPTIEGLEDSFNSSYSTYHDLLKVGIKQEILDNPVNTEMLENIVKILTVFEDKRMIKEQLQQFSDVLDGVVLKKLERRHYTGWGRLSAKLLMGIRDKQSHLTILDYLMNDDGLNRNLMQLINDSNLSFKSIIEKEQVTTADKDIQSIVADLAGSPAIKKGILQSLKIVDELVSVMGYPPQTIVVEMARENQTTGKGKNNSRPRYKSLEKAIKEFGSQILKEHPTDNQELRNNRLYLYYLQNGKDMYTGQDLDIHNLSNYDIDHIVPQSFITDNSIDNLVLTSSAGNREKGDDVPPLEIVRKRKVFWEKLYQGNLMSKRKFDYLTKAERGGLTEADKARFIHRQLVETRQITKNVANILHQRFNYEKDDHGNTMKQVRIVTLKSALVSQFRKQFQLYKVRDVNDYHHAHDAYLNGVVANTLLKVYPQLEPEFVYGDYHQFDWFKANKATAKKQFYTNIMLFFAQKDRIIDENGEILWDKKYLDTVKKVMSYRQMNIVKKTEIQKGEFSKATIKPKGNSSKLIPRKTNWDPMKYGGLDSPNMAYAVVIEYAKGKNKLVFEKKIIRVTIMERKAFEKDEKAFLEEQGYRQPKVLAKLPKYTLYECEEGRRRMLASANEAQKGNQQVLPNHLVTLLHHAANCEVSDGKSLDYIESNREMFAELLAHVSEFAKRYTLAEANLNKINQLFEQNKEGDIKAIAQSFVDLMAFNAMGAPASFKFFETTIERKRYNNLKELLNSTIIYQSITGLYESRKRLDD

SEQ ID NO: 10 - protein, 1368 aa, Streptococcus pyogenes; identical to SEQ ID NO: 8

SEQ ID NO: 11 - protein, 1370 aa, Streptococcus agalactiae
MNKPYSIGLDIGTNSVGWSIITDDYKVPAKKMRVLGNTDKEYIKKNLIGALLFDGGNTAADRRLKRTARRRYTRRRNRILYLQEIFAEEMSKVDDSFFHRLEDSFLVEEDKRGSKYPIFATLQEEKDYHEKFSTIYHLRKELADKKEKADLRLIYIALAHIIKFRGHFLIEDDSFDVRNTDISKQYQDFLEIFNTTFENNDLLSQNVDVEAILTDKISKSAKKDRILAQYPNQKSTGIFAEFLKLIVGNQADFKKYFNLEDKTPLQFAKDSYDEDLENLLGQIGDEFADLFSAAKKLYDSVLLSGILTVIDLSTKAPLSASMIQRYDEHREDLKQLKQFVKASLPEKYQEIFADSSKDGYAGYIEGKTNQEAFYKYLSKLLTKQEDSENFLEKIKNEDFLRKQRTFDNGSIPHQVHLTELKAIIRRQSEYYPFLKENQDRIEKILTFRIPYYIGPLAREKSDFAWMTRKTDDSIRPWNFEDLVDKEKSAEAFIHRMTNNDFYLPEEKVLPKHSLIYEKFTVYNELTKVRYKNEQGETYFFDSNIKQEIFDGVFKEHRKVSKKKLLDFLAKEYEEFRIVDVIGLDKENKAFNASLGTYHDLEKILDKDFLDNPDNESILEDIVQTLTLFEDREMIKKRLENYKDLFTESQLKKLYRRHYTGWGRLSAKLINGIRDKESQKTILDYLIDDGRSNRNFMQLINDDGLSFKSIISKAQAGSHSDNLKEVVGELAGSPAIKKGILQSLKIVDELVKVMGYEPEQIVVEMARENQTTNQGRRNSRQRYKLLDDGVKNLASDLNGNILKEYPTDNQALQNERLFLYYLQNGRDMYTGEALDIDNLSQYDIDHIIPQAFIKDDSIDNRVLVSSAKNRGKSDDVPSLEIVKDCKVFWKKLLDAKLMSQRKYDNLTKAERGGLTSDDKARFIQRQLVETRQITKHVARILDERFNNELDSKGRRIRKVKIVTLKSNLVSNFRKEFGFYKIREVNNYHHAHDAYLNAVVAKAILTKYPQLEPEFVYGDYPKYNSYKTRKSATEKLFFYSNIMNFFKTKVTLADGTVVVKDDIEVNNDTGEIVWDKKKHFATVRKVLSYPQNNIVKKTEIQTGGFSKESILAHGNSDKLIPRKTKDIYLDPKKYGGFDSPIVAYSVLVVADIKKGKAQKLKTVTELLGITIMERSRFEKNPSAFLESKGYLNIRADKLIILPKYSLFELENGRRRLLASAGELQKGNELALPTQFMKFLYLASRYNESKGKPEEIEKKQEFVNQHVSYFDDILQLINDFSKRVILADANLEKINKLYQDNKENISVDELANNIINLFTFTSLGAPAAFKFFDKIVDRKRYTSTKEVLNSTLIHQSITGLYETRIDLGKLGED

SEQ ID NO: 12 - protein, 1345 aa, Streptococcus mutans
MKKPYSIGLDIGTNSVGWAVVTDDYKVPAKKMKVLGNTDKSHIEKNLLGALLFDSGNTAEDRRLKRTARRRYTRRRNRILYLQEIFSEEMGKVDDSFFHRLEDSFLVTEDKRGERHPIFGNLEEEVKYHENFPTIYHLRQYLADNPEKVDLRLVYLALAHIIKFRGHFLIEGKFDTRNNDVQRLFQEFLAVYDNTFENSSLQEQNVQVEEILTDKISKSAKKDRVLKLFPNEKSNGRFAEFLKLIVGNQADFKKHFELEEKAPLQFSKDTYEEELEVLLAQIGDNYAELFLSAKKLYDSILLSGILTVTDVGTKAPLSASMIQRYNEHQMDLAQLKQFIRQKLSDKYNEVFSDVSKDGYAGYIDGKTNQEAFYKYLKGLLNKIEGSGYFLDKIEREDFLRKQRTFDNGSIPHQIHLQEMRAIIRRQAEFYPFLADNQDRIEKLLTFRIPYYVGPLARGKSDFAWLSRKSADKITPWNFDEIVDKESSAEAFINRMTNYDLYLPNQKVLPKHSLLYEKFTVYNELTKVKYKTEQGKTAFFDANMKQEIFDGVFKVYRKVTKDKLMDFLEKEFDEFRIVDLTGLDKENKVFNASYGTYHDLCKILDKDFLDNSKNEKILEDIVLTLTLFEDREMIRKRLENYSDLLTKEQVKKLERRHYTGWGRLSAELIHGIRNKESRKTILDYLIDDGNSNRNFMQLINDDALSFKEEIAKAQVIGETDNLNQVVSDIAGSPAIKKGILQSLKIVDELVKIMGHQPENIVVEMARENQFTNQGRRNSQQRLKGLTDSIKEFGSQILKEHPVENSQLQNDRLFLYYLQNGRDMYTGEELDIDYLSQYDIDHIIPQAFIKDNSIDNRVLTSSKENRGKSDDVPSKDVVRKMKSYWSKLLSAKLITQRKFDNLTKAERGGLTDDDKAGFIKRQLVETRQITKHVARILDERFNTETDENNKKIRQVKIVTLKSNLVSNFRKEFELYKVREINDYHHAHDAYLNAVIGKALLGVYPQLEPEFVYGDYPHFHGHKENKATAKKFFYSNIMNFFKKDDVRTDKNGEIIWKKDEHISNIKKVLSYPQVNIVKKVEEQTGGFSKESILPKGNSDKLIPRKTKKFYWDTKKYGGFDSPIVAYSILVIADIEKGKSKKLKTVKALVGVTIMEKMTFERDPVAFLERKGYRNVQEENIIKLPKYSLFKLENGRKRLLASARELQKGNEIVLPNHLGTLLYHAKNIHKVDEPKHLDYVDKHKDEFKELLDVVSNFSKKYTLAEGNLEKIKELYAQNNGEDLKELASSFINLLTFTAIGAPATFKFFDKNIDRKRYTSTTEILNATLIHQSITGLYETRIDLNKLGGD

SEQ ID NO: 13 - protein, 1377 aa, Streptococcus agalactiae
MNKPYSIGLDIGTNSVGWSIITDDYKVPAKKMRVLGNTDKEYIKKNLIGALLFDGGNTAADRRLKRTARRRYTRRRNRILYLQEIFAEEMSKVDDSFFHRLEDSFLVEEDKRGSKYPIFATMQEEKYYHEKFPTIYHLRKELADKKEKADLRLVYLALAHIIKFRGHFLIEDDRFDVRNTDIQKQYQAFLEIFDTTFENNHLLSQNVDVEAILTDKISKSAKKDRILAQYPNQKSTGIFAEFLKLIVGNQADFKKHFNLEDKTPLQFAKDSYDEDLENLLGQIGDEFADLFSVAKKLYDSVLLSGILTVTDLSTKAPLSASMIQRYDEHHEDLKHLKQFVKASLPENYREVFADSSKDGYAGYIEGKTNQEAFYKYLLKLLTKQEGSEYFLEKIKNEDFLRKQRTFDNGSIPHQVHLTELRAIIRRQSEYYPFLKENQDRIEKILTFRIPYYVGPLAREKSDFAWMTRKTDDSIRPWNFEDLVDKEKSAEAFIHRMTNNDLYLPEEKVLPKHSLIYEKFTVYNELTKVRFLAEGFKDFQFLNRKQKETIFNSLFKEKRKVTEKDIISFLNKVDGYEGIAIKGIEKQFNASLSTYHDLKKILGKDFLDNTDNELILEDIVQTLTLFEDREMIKKCLDIYKDFFTESQLKKLYRRHYTGWGRLSAKLINGIRNKENQKTILDYLIDDGSANRNFMQLINDDDLSFKPIIDKARTGSHSDNLKEVVGELAGSPAIKKGILQSLKIVDELVKVMGYEPEQIVVEMARENQTTAKGLSRSRQRLTTLRESLANLKSNILEEKKPKYVKDQVENHHLSDDRLFLYYLQNGRDMYTKKALDIDNLSQYDIDHIIPQAFIKDDSIDNRVLVSSAKNRGKSDDVPSIEIVKARKMFWKNLLDAKLMSQRKYDNLTKAERGGLTSDDKARFIQRQLVETRQITKHVARILDERFNNEVDNGKKICKVKIVTLKSNLVSNFRKEFGFYKIREVNDYHHAHDAYLNAVVAKAILTKYPQLEPEFVYGMYRQKKLSKIVHEDKEEKYSEATRKMFFYSNLMNMFKRVVRLADGSIVVRPVIETGRYMRKTAWDKKKHFATVRKVLSYPQNNIVKKTEIQTGGFSKESILAHGNSDKLIPRKTKDIYLDPKKYGGFDSPIVAYSVLVVADIKKGKAQKLKTVTELLGITIMERSRFEKNPSAFLESKGYLNIRDDKLMILPKYSLFELENGRRRLLASAGELQKGNELALPTQFMKFLYLASRYNESKGKPEEIEKKQEFVNQHVSYFDDILQLINDFSKRVILADANLEKINKLYQDNKENIPVDELANNIINLFTFTSLGAPAAFKFFDKIVDRKRYTSTKEVLNSTLIHQSITGLYETRIDLGKLGED

SEQ ID NO: 14 - protein, 131 aa, Helicobacter hepaticus
MRILGFDIGITSIGWAYVESNELKDCGVRIFTKAENPKNGDSLAAPRREARGARRRLARRKARLNAIKRLLCKEFELNLNDYLANDGELPKAYQTSKDTKSPYELYTAFHWIIFAFCSIASSLSNRQMLPI

SEQ ID NO: 15 - protein, 1059 aa, Wolinella succinogenes
MIERILGVDLGISSLGWAIVEYDKDDEAANRIIDCGVRLFTAAETPKKKESPNKARREARGIRRVLNRRRVRMNMIKKLFLRAGLIQDVDLDGEGGMFYSKANRADVWELRHDGLYRLLKGDELARVLIHIAKHRGYKFIGDDEADEESGKVKKAGVVLRQNFEAAGCRTVGEWLWRERGANGKKRNKHGDYEISIHRDLLVEEVEAIFVAQQEMRSTIATDALKAAYREIAFFVRPMQRIEKMVGHCTYFPEERRAPKSAPTAEKFIAISKFFSTVIIDNEGWEQKIIERKTLEELLDFAVSREKVEFRHLRKFLDLSDNEIFKGLHYKGKPKTAKKREATLFDPNEPTELEFDKVEAEKKAWISLRGAAKLREALGNEFYGRFVALGKHADEATKILTYYKDEGQKRRELTKLPLEAEMVERLVKIGFSDFLKLSLKAIRDILPAMESGARYDEAVLMLGVPHKEKSAILPPLNKTDIDILNPTVIRAFAQFRKVANALVRKYGAFDRVHFELAREINTKGEIEDIKESQRKNEKERKEAADWIAETSFQVPLTRKNILKKRLYIQQDGRCAYTGDVIELERLFDEGYCEIDHILPRSRSADDSFANKVLCLARANQQKTDRTPYEWFGHDAARWNAFETRTSAPSNRVRTGKGKIDRLLKKNFDENSEMAFKDRNLNDTRYMARAIKTYCEQYWVFKNSHTKAPVQVRSGKLTSVLRYQWGLESKDRESHTHHAVDAIIIAFSTQGMVQKLSEYYRFKETHREKERPKLAVPLANFRDAVEEATRIENTETVKEGVEVKRLLISRPPRARVTGQAHEQTAKPYPRIKQVKNKKKWRLAPIDEEKFESFKADRVASANQKNFYETSTIPRVDVYHKKGKFHLVPIYLHEMVLNELPNLSLGTNPEAMDENFFKFSIFKDDLISIQTQGTPKKPAKIIMGYFKNMHGANMVLSSINNSPCEGFTCTPVSMDKKHKDKCKLCPEENRIAGRCLQGFLDYWSQEGLRPPRKEFECDQGVKFALDVKKYQIDPLGYYYEVKQEKRLGTIPQMRSAKKLVKK

SEQ ID NO: 16 - protein, 1409 aa, Wolinella succinogenes
MLVSPISVDLGGKNTGFFSFTDSLDNSQSGTVIYDESFVLSQVGRRSKRHSKRNNLRNKLVKRLFLLILQEHHGLSIDVLPDEIRGLFNKRGYTYAGFELDEKKKDALESDTLKEFLSEKLQSIDRDSDVEDFLNQIASNAESFKDYKKGFEAVFASATHSPNKKLELKDELKSEYGENAKELLAGLRVTKEILDEFDKQENQGNLPRAKYFEELGEYIATNEKVKSFFDSNSLKLTDMTKLIGNISNYQLKELRRYFNDKEMEKGDIWIPNKLHKITERFVRSWHPKNDADRQRRAELMKDLKSKEIMELLTTTEPVMTIPPYDDMNNRGAVKCQTLRLNEEYLDKHLPNWRDIAKRLNHGKFNDDLADSTVKGYSEDSTLLHRLLDTSKEIDIYELRGKKPNELLVKTLGQSDANRLYGFAQNYYELIRQKVRAGIWVPVKNKDDSLNLEDNSNMLKRCNHNPPHKKNQIHNLVAGILGVKLDEAKFAEFEKELWSAKVGNKKLSAYCKNIEELRKTHGNTFKIDIEELRKKDPAELSKEEKAKLRLTDDVILNEWSQKIANFFDIDDKHRQRFNNLFSMAQLHTVIDTPRSGFSSTCKRCTAENRFRSETAFYNDETGEFHKKATATCQRLPADTQRPFSGKIERYIDKLGYELAKIKAKELEGMEAKEIKVPIILEQNAFEYEESLRKSKTGSNDRVINSKKDRDGKKLAKAKENAEDRLKDKDKRIKAFSSGICPYCGDTIGDDGEIDHILPRSHTLKIYGTVFNPEGNLIYVHQKCNQAKADSIYKLSDIKAGVSAQWIEEQVANIKGYKTFSVLSAEQQKAFRYALFLQNDNEAYKKVVDWLRTDQSARVNGTQKYLAKKIQEKLTKMLPNKHLSFEFILADATEVSELRRQYARQNPLLAKAEKQAPSSHAIDAVMAFVARYQKVFKDGTPPNADEVAKLAMLDSWNPASNEPLTKGLSTNQKIEKMIKSGDYGQKNMREVFGKSIFGENAIGERYKPIVVQEGGYYIGYPATVKKGYELKNCKVVTSKNDIAKLEKIIKNQDLISLKENQYIKIFSINKQTISELSNRYFNMNYKNLVERDKEIVGLLEFIVENCRYYTKKVDVKFAPKYIHETKYPFYDDWRRFDEAWRYLQENQNKTSSKDRFVIDKSSLNEYYQPDKNEYKLDVDTQPIWDDFCRWYFLDRYKTANDKKSIRIKARKTFSLLAESGVQGKVFRAKRKIPTGYAYQALPMDNNVIAGDYANILLEANSKTLSLVPKSGISIEKQLDKKLDVIKKTDVRGLAIDNNSFFNADFDTHGIRLIVENTSVKVGNFPISAIDKSAKRMIFRALFEKEKGKRKKKTTISFKESGPVQDYLKVFLKKIVKIQLRTDGSISNIVVRKNAADFTLSFRSEHIQKLLK

SEQ ID NO: 17 - protein, 1374 aa, Fusobacterium nucleatum
MKKQKFSDYYLGFDIGTNSVGWCVTDLDYNVLRFNKKDMWGSRLFDEAKTAAERRVQRNSRRRLKRRKWRLNLLEEIFSDEIMKIDSNFFRRLKESSLWLEDKNSKEKFTLFNDDNYKDYDFYKQYPTIFHLRDELIKNPEKKDIRLIYLALHSIFKSRGHFLFEGQNLKEIKNFETLYNNLISFLEDNGINKSIDKDNIEKLEKIICDSGKGLKDKEKEFKGIFNSDKQLVAIFKLSVGSSVSLNDLFDTDEYKKEEVEKEKISFREQIYEDDKPIYYSILGEKIELLDIAKSFYDFMVLNNILSDSNYISEAKVKLYEEHKKDLKNLKYIIRKYNKENYDKLFKDKNENNYPAYIGLNKEKDKKEVVEKSRLKIDDLIKVIKGYLPKPERIEEKDKTIFNEILNKIELKTILPKQRISDNGTLPYQIHEVELEKILENQSKYYDFLNYEENGVSTKDKLLKTFKFRIPYYVGPLNSYHKDKGGNSWIVRKEEGKILPWNFEQKVDIEKSAEEFIKRMTNKCTYLNGEDVIPKDSFLYSEYIILNELNKVQVNDEFLNEENKRKIIDELFKENKKVSEKKFKEYLLVNQIANRTVELKGIKDSFNSNYVSYIKFKDIFGEKLNLDIYKEISEKSILWKCLYGDDKKIFEKKIKNEYGDILNKDEIKKINSFKFNTWGRLSEKLLTGIEFINLETGECYSSVMEALRRTNYNLMELLSSKFTLQESIDNENKEMNEVSYRDLIEESYVSPSLKRAILQTLKIYEEIKKITGRVPKKVFIEMARGGDESMKNKKIPARQEQLKKLYDSCGNDIANFSIDIKEMKNSLSSYDNNSLRQKKLYLYYLQFGKCMYTGREIDLDRLLQNNDTYDIDHIYPRSKVIKDDSFDNLVLVLKNENAEKSNEYPVKKEIQEKMKSFWRFLKEKNFISDEKYKRLTGKDDFELRGFMARQLVNVRQTTKEVGKILQQIEPEIKIVYSKAEIASSFREMFDFIKVRELNDTHHAKDAYLNIVAGNVYNTKFTEKPYRYLQEIKENYDVKKIYNYDIKNAWDKENSLEIVKKNMEKNTVNITRFIKEEKGELFNLNPIKKGETSNEIISIKPKLYDGKDNKLNEKYGYYTSLKAAYFIYVEHEKKNKKVKTFERITRIDSTLIKNEKNLIKYLVSQKKLLNPKIIKKIYKEQTLIIDSYPYTFTGVDSNKKVELKNKKQLYLEKKYEQILKNALKFVEDNQGETEENYKFIYLKKRNNNEKNETIDAVKERYNIEFNEMYDKFLEKLSSKDYKNYINNKLYTNFLNSKEKFKKLKLWEKSLILREFLKIFNKNTYGKYEIKDSQTKEKLFSFPEDTGRIRLGQSSLGNNKELLEESVTGLFVKKIKL

SEQ ID NO: 18 - protein, 1084 aa, Corynebacterium diphtheriae
MKYHVGIDVGTFSVGLAAIEVDDAGMPIKTLSLVSHIHDSGLDPDEIKSAVTRLASSGIARRTRRLYRRKRRRLQQLDKFIQRQGWPVIELEDYSDPLYPWKVRAELAASYIADEKERGEKLSVALRHIARHRGWRNPYAKVSSLYLPDGPSDAFKAIREEIKRASGQPVPETATVGQMVTLCELGTLKLRGEGGVLSARLQQSDYAREIQEICRMQEIGQELYRKIIDVVFAAESPKGSASSRVGKDPLQPGKNRALKASDAFQRYRIAALIGNLRVRVDGEKRILSVEEKNLVFDHLVNLTPKKEPEWVTIAEILGIDRGQLIGTATMTDDGERAGARPPTHDTNRSIVNSRIAPLVDWWKTASALEQHAMVKALSNAEVDDFDSPEGAKVQAFFADLDDDVHAKLDSLHLPVGRAAYSEDTLVRLTRRMLSDGVDLYTARLQEFGIEPSWTPPTPRIGEPVGNPAVDRVLKTVSRWLESATKTWGAPERVIIEHVREGFVTEKRAREMDGDMRRRAARNAKLFQEMQEKLNVQGKPSRADLWRYQSVQRQNCQCAYCGSPITFSNSEMDHIVPRAGQGSTNTRENLVAVCHRCNQSKGNTPFAIWAKNTSIEGVSVKEAVERTRHWVTDTGMRSTDFKKFTKAVVERFQRATMDEEIDARSMESVAWMANELRSRVAQHFASHGTTVRVYRGSLTAEARRASGISGKLKFFDGVGKSRLDRRHHAIDAAVIAFTSDYVAETLAVRSNLKQSQAHRQEAPQWREFTGKDAEHRAAWRVWCQKMEKLSALLTEDLRDDRVVVMSNVRLRLGNGSAHKETIGKLSKVKLSSQLSVSDIDKASSEALWCALTREPGFDPKEGLPANPERHIRVNGTHVYAGDNIGLFPVSAGSIALRGGYAELGSSFHHARVYKITSGKKPAFAMLRVYTIDLLPYRNQDLFSVELKPQTMSMRQAEKKLRDALATGNAEYLGWLVVDDELVVDTSKIATDQVKAVEAELGTIRRWRVDGFFSPSKLRLRPLQMSKEGIKKESAPELSKIIDRPGWLPAVNKLFSDGNVTVVRRDSLGRVRLESTAHLPVTWKVQ

SEQ ID NO: 19 - protein, 1395 aa, Treponema denticola
MKKEIKDYFLGLDVGTGSVGWAVTDTDYKLLKANRKDLWGMRCFETAETAEVRRLHRGARRRIERRKKRIKLLQELFSQEIAKTDEGFFQRMKESPFYAEDKTILQENTLFNDKDFADKTYHKAYPTINHLIKAWIENKVKPDPRLLYLACHNIIKKRGHFLFEGDFDSENQFDTSIQALFEYLREDMEVDIDADSQKVKEILKDSSLKNSEKQSRLNKILGLKPSDKQKKAITNLISGNKINFADLYDNPDLKDAEKNSISFSKDDFDALSDDLASILGDSFELLLKAKAVYNCSVLSKVIGDEQYLSFAKVKIYEKHKTDLTKLKNVIKKHFPKDYKKVFGYNKNEKNNNNYSGYVGVCKTKSKKLIINNSVNQEDFYKFLKTILSAKSEIKEVNDILTEIETGTFLPKQISKSNAEIPYQLRKMELEKILSNAEKHFSFLKQKDEKGLSHSEKIIMLLTFKIPYYIGPINDNHKKFFPDRCWVVKKEKSPSGKTTPWNFFDHIDKEKTAEAFITSRTNFCTYLVGESVLPKSSLLYSEYTVLNEINNLQIIIDGKNICDIKLKQKIYEDLFKKYKKITQKQISTFIKHEGICNKTDEVIILGIDKECTSSLKSYIELKNIFGKQVDEISTKNMLEEIIRWATIYDEGEGKTILKTKIKAEYGKYCSDEQIKKILNLKFSGWGRLSRKFLETVTSEMPGFSEPVNIITAMRETQNNLMELLSSEFTFTENIKKINSGFEDAEKQFSYDGLVKPLFLSPSVKKMLWQTLKLVKEISHITQAPPKKIFIEMAKGAELEPARTKTRLKILQDLYNNCKNDADAFSSEIKDLSGKIENEDNLRLRSDKLYLYYTQLGKCMYCGKPIEIGHVFDTSNYDIDHIYPQSKIKDDSISNRVLVCSSCNKNKEDKYPLKSEIQSKQRGFWNFLQRNNFISLEKLNRLTRATPISDDETAKFIARQLVETRQATKVAAKVLEKMFPETKIVYSKAETVSMFRNKFDIVKCREINDFHHAHDAYLNIVVGNVYNTKFTNNPWNFIKEKRDNPKIADTYNYYKVFDYDVKRNNITAWEKGKTIITVKDMLKRNTPIYTRQAACKKGELFNQTIMKKGLGQHPLKKEGPFSNISKYGGYNKVSAAYYTLIEYEEKGNKIRSLETIPLYLVKDIQKDQDVLKSYLTDLLGKKEFKILVPKIKINSLLKINGFPCHITGKTNDSFLLRPAVQFCCSNNEVLYFKKIIRFSEIRSQREKIGKTISPYEDLSFRSYIKENLWKKTKNDEIGEKEFYDLLQKKNLEIYDMLLTKHKDTIYKKRPNSATIDILVKGKEKFKSLIIENQFEVILEILKLFSATRNVSDLQHIGGSKYSGVAKIGNKISSLDNCILIYQSITGIFEKRIDLLKV

SEQ ID NO: 20 - protein, 1334 aa, Listeria monocytogenes
MKNPYTIGLDIGTNSVGWAVLTNQYDLVKRKMKVAGNSDKKQIKKNFWGVRLFDDGQTAVDRRMNRTARRRIERRRNRISYLQEIFAVEMANIDANFFCRLNDSFYVDSEKRNSRHPFFATIEEEVAYHDNYRTIYHLREKLVNSSEKADLRLVYLALAHIIKYRGNFLIEGALDTKNTSVDEVYKQFIETYNQVFMSNIEEGALAKVEENIEVANILAGKFTRREKFERILQLYPGEKSTGMFAQFISLIVGSKGNFQKVFDLIEKTDIECAKDSYEEDLETLLAIIGDEYAELFVAAKNTYNAVVLSSIITVTDTETNAKLSASMIERFDAHEKDLVELKAFIKLNLPKQYEEIFSNAAIDGYAGYIDGKTKQVDFYKYLKTILENIEGSDYFIAKIEEENFLRKQRTFDNGAIPHQLHLEELEAIIHQQAKYYPFLKEDYDKIKSLVTFRIPYFVGPLANGQSEFAWLTRKADGEIRPWNIEEKVDFGKSAVDFIEKMTNKDTYLPKENVLPKHSLCYQKYMVYNELTKIRYIDDQGKTNYFSGREKQQVFNDLFKQKRKVKKKDLELFLRNINHIESPTIEGLEDSFNASYATYHDLLKVGMKQEILDNPLNTEMLEDIVKILTVFEDKPMIKEQLQQFSDVLDGGVLKKLERRHYTGWGRLSAKLLVGIREKQSHLTILDYLMNDDGLNRNLMQLINDSNLSFKSIIEKEQVSTTDKDLQSIVAELAGSPAIKKGILQSLKIVDELVSIMGYPPQTIVVEMARENQTTGKGKNNSKPRYKSLEKAIKEFGSQILKEHPTDNQELKNNRLYLYYLQNGKDMYTGQELDIHNLSNYDIDHIVPQSFITDNSIDNLVLTSSAGNREKGGDVPPLEIVRKRKVFWEKLYQGNLMSKRKFDYLTKAERGGLTEADKARFIHRQLVETRQITKNVANILYQRFNKETDNHGNTMEQVRIVTLKSALVSQFRKQFQLYKVREVNGYHHAHDAYLNGVVANTLLKVYPQLEPEFVYGEYHQFDWFKANKATAKKQFYTNIMLFFAQKERIIDENGEILWDKKYLETIKKVLDYRQMNIVKKTEIQKGEFSKATIKPKGNSSKLIPRKENWDPMKYGGLDSPNMAYAVIIEHAKGKKKIVIEKKLIQINIMERKMFEKDEEAFLEEKGYRHPKVLTKLPKYTLYECEKGRRRMLASANEAQKGNQLVLSNHLVSLLYHAKNCEASDGKSLKYIEAHRETFSELLAQVSEFATRYTLADANLSKINNLFEQNKEGDIKAIAQSFVDLMAFNAMGAPASFKFFEATIDRKRYTNLKELLSSTIIYQSITGLYESRKRLDD

SEQ ID NO: 21 - protein, 1236 aa, Mycoplasma mobile
MYFYKNKENKLNKKVVLGLDLGIASVGWCLTDISQKEDNKFPIILHGVRLFETVDDSDDKLLNETRRKKRGQRRRNRRLFTRKRDFIKYLIDNNIIELEFDKNPKILVRNFIEKYINPFSKNLELKYKSVTNLPIGFHNLRKAAINEKYKLDKSELIVLLYFYLSLRGAFFDNPEDTKSKEMNKNEIEIFDKNESIKNAEFPIDKIIEFYKISGKIRSTINLKFGHQDYLKEIKQVFEKQNIDFMNYEKFAMEEKSFFSRIRNYSEGPGNEKSFSKYGLYANENGNPELIINEKGQKIYTKIFKTLWESKIGKCSYDKKLYRAPKNSFSAKVFDITNKLTDWKHKNEYISERLKRKILLSRFLNKDSKSAVEKILKEENIKFENLSEIAYNKDDNKINLPIINAYHSLTTIFKKHLINFENYLISNENDLSKLMSFYKQQSEKLFVPNEKGSYEINQNNNVLHIFDAISNILNKFSTIQDRIRILEGYFEFSNLKKDVKSSEIYSEIAKLREFSGTSSLSFGAYYKFIPNLISEGSKNYSTISYEEKALQNQKNNFSHSNLFEKTWVEDLIASPTVKRSLRQTMNLLKEIFKYSEKNNLEIEKIVVEVTRSSNNKHERKKIEGINKYRKEKYEELKKVYDLPNENTTLLKKLWLLRQQQGYDAYSLRKIEANDVINKPWNYDIDHIVPRSISFDDSFSNLVIVNKLDNAKKSNDLSAKQFIEKIYGIEKLKEAKENWGNWYLRNANGKAFNDKGKFIKLYTIDNLDEFDNSDFINRNLSDTSYITNALVNHLTFSNSKYKYSVVSVNGKQTSNLRNQIAFVGIKNNKETEREWKRPEGFKSINSNDFLIREEGKNDVKDDVLIKDRSFNGHHAEDAYFITIISQYFRSFKRIERLNVNYRKETRELDDLEKNNIKFKEKASFDNFLLINALDELNEKLNQMRFSRMVITKKNTQLFNETLYSGKYDKGKNTIKKVEKLNLLDNRTDKIKKIEEFFDEDKLKENELTKLHIFNHDKNLYETLKIIWNEVKIEIKNKNLNEKNYFKYFVNKKLQEGKISFNEWVPILDNDFKIIRKIRYIKFSSEEKETDEIIFSQSNFLKIDQRQNFSFHNTLYWVQIWVYKNQKDQYCFISIDARNSKFEKDEIKINYEKLKTQKEKLQIINEEPILKINKGDLFENEEKELFYIVGRDEKPQKLEIKYILGKKIKDQKQIQKPVKKYFPNWKKVNLTYMGEIFKK

SEQ ID NO: 22 - protein, 1372 aa, Legionella pneumophila
MESSQILSPIGIDLGGKFTGVCLSHLEAFAELPNHANTKYSVILIDHNNFQLSQAQRRATRHRVRNKKRNQFVKRVALQLFQHILSRDLNAKEETALCHYLNNRGYTYVDTDLDEYIKDETTINLLKELLPSESEHNFIDWFLQKMQSSEFRKILVSKVEEKKDDKELKNAVKNIKNFITGFEKNSVEGHRHRKVYFENIKSDITKDNQLDSIKKKIPSVCLSNLLGHLSNLQWKNLHRYLAKNPKQFDEQTFGNEFLRMLKNFRHLKGSQESLAVRNLIQQLEQSQDYISILEKTPPEITIPPYEARTNTGMEKDQSLLLNPEKLNNLYPNWRNLIPGIIDAHPFLEKDLEHTKLRDRKRIISPSKQDEKRDSYILQRYLDLNKKIDKFKIKKQLSFLGQGKQLPANLIETQKEMETHFNSSLVSVLIQIASAYNKEREDAAQGIWFDNAFSLCELSNINPPRKQKILPLLVGAILSEDFINNKDKWAKFKIFWNTHKIGRTSLKSKCKEIEEARKNSGNAFKIDYEEALNHPEHSNNKALIKIIQTIPDIIQAIQSHLGHNDSQALIYHNPFSLSQLYTILETKRDGFHKNCVAVTCENYWRSQKTEIDPEISYASRLPADSVRPFDGVLARMMQRLAYEIAMAKWEQIKHIPDNSSLLIPIYLEQNRFEFEESFKKIKGSSSDKTLEQAIEKQNIQWEEKFQRIINASMNICPYKGASIGGQGEIDHIYPRSLSKKHFGVIFNSEVNLIYCSSQGNREKKEEHYLLEHLSPLYLKHQFGTDNVSDIKNFISQNVANIKKYISFHLLTPEQQKAARHALFLDYDDEAFKTITKFLMSQQKARVNGTQKFLGKQIMEFLSTLADSKQLQLEFSIKQITAEEVHDHRELLSKQEPKLVKSRQQSFPSHAIDATLTMSIGLKEFPQFSQELDNSWFINHLMPDEVHLNPVRSKEKYNKPNISSTPLFKDSLYAERFIPVWVKGETFAIGFSEKDLFEIKPSNKEKLFTLLKTYSTKNPGESLQELQAKSKAKWLYFPINKTLALEFLHHYFHKEIVTPDDTTVCHFINSLRYYTKKESITVKILKEPMPVLSVKFESSKKNVLGSFKHTIALPATKDWERLFNHPNFLALKANPAPNPKEFNEFIRKYFLSDNNPNSDIPNNGHNIKPQKHKAVRKVFSLPVIPGNAGTMMRIRRKDNKGQPLYQLQTIDDTPSMGIQINEDRLVKQEVLMDAYKTRNLSTIDGINNSEGQAYATFDNWLTLPVSTFKPEIIKLEMKPHSKTRRYIRITQSLADFIKTIDEALMIKPSDSIDDPLNMPNEIVCKNKLFGNELKPRDGKMKIVSTGKIVTYEFESDSTPQWIQTLYVTQLKKQP

SEQ ID NO: 23 - protein, 1122 aa, Streptococcus thermophilus
MSDLVLGLDIGIGSVGVGILNKVTGEIIHKNSRIFPAAQAENNLVRRTNRQGRRLTRRKKHRIVRLNRLFEESGLITDFTKISINLNPYQLRVKGLTDELSNEELFIALKNMVKHRGISYLDDASDDGNSSVGDYAQIVKENSKQLETKTPGQIQLERYQTYGQLRGDFTVEKDGKKHRLINVFPTSAYRSEALRILQTQQEFNSQITDEFINRYLEILTGKRKYYHGPGNEKSRTDYGRYRTNGETLDNIFGILIGKCTFYPDEFRAAKASYTAQEFNLLNDLNNLTVPTETKKLSKEQKNQIINYVKNEKVMGPAKLFKYIAKLLSCDVADIKGHRIDKSGKAEIHTFEAYRKMKTLETLDIEQMDRETLDKLAYVLTLNTEREGIQEALEHEFADGSFSQKQVDELVQFRKANSSIFGKGWHNFSVKLMMELIPELYETSEEQMTILTRLGKQKTTSSSNKTKYIDEKLLTEEIYNPVVAKSVRQAIKIVNAAIKEYGDFDNIVIEMARETNEDDEKKAIQKIQKANKDEKDAAMLKAANQYNGKAELPHSVFHGHKQLATKIRLWHQQGERCLYTGKTISIHDLINNPNQFEVDHILPLSITFDDSLANKVLVYATANQEKGQRTPYQALDSMDDAWSFRELKAFVRESKTLSNKKKEYLLTEEDISKFDVRKKFIERNLVDTRYASRVVLNALQEHFRAHKIDTKVSVVRGQFTSQLRRHWGIEKTRDTYHHHAVDALIIAASSQLNLWKKQKNTLVSYSEEQLLDIETGELISDDEYKESVFKAPYQHFVDTLKSKEFEDSILFSYQVDSKFNRKISDATIYATRQAKVGKDKKDETYVLGKIKDIYTQDGYDAFMKIYKKDKSKFLMYRHDPQTFEKVIEPILENYPNKEMNEKGKEVPCNPFLKYKEEHGYIRKYSKKGNGPEIKSLKYYDSKLLGNPIDITPENSKNKVVLQSLKPWRTDVYFNKNTGKYEILGLKYADLQFEKKTGTYKISQEKYNGIMKEEGVDSDSEFKFTLYKNDLLLVKDTETKEQQLFRFLSRTMPNVKYYVELKPYSKDKFEKNESLIEILGSADKSGRCIKGLGKSNISIYKVRTDVLGNQHIIKNEGDKPKLDF

SEQ ID NO: 24 - protein, 1128 aa, Streptococcus thermophilus
MSDLVLGLDIGIGSVGVGILNKVTGEIIHKNSRIFPAAQAENNLVRRTNRQGRRLTRRKKHRIVRLNRLFEESGLITDFTKISINLNPYQLRVKGLTDELSNEELFIALKNMVKHRGISYLDDASDDGNSSVGDYAQIVKENSKQLETKTPGQIQLERYQTYGQLRGDFTVEKDGKKHRLINVFPTSAYRSEALRILQTQQEFNPQITDEFINRYLEILTGKRKYYHGPGNEKSRTDYGRYRTSGETLDNIFGILIGKCTFYPEEFRAAKASYTAQEFNLLNDLNNLTVPTETKKLSKEQKNQIINYVKNEKAMGPAKLFKYIAKLLSCDVADIKGYRIDKSGKAEIHTFEAYRKMKTLETLDIEQMDRETLDKLAYVLTLNTEREGIQEALEHEFADGSFSQKQVDELVQFRKANSSIFGKGWHNFSVKLMMELIPELYETSEEQMTILTRLGKQKRLRLQIKQNISNKTKYIDEKLLTEEIYNPVVAKSVRQAIKIVNAAIKEYGDFDNIVIEMARETNEDDEKKAIQKIQKANKDEKDAAMLKAANQYNGKAELPHSVFHGHKQLATKIRLWHQQGERCLYTGKTISIHDLINNPNQFEVDHILPLSITFDDSLANKVLVYATANQEKGQRTPYQALDSMDDAWSFRELKAFVRESKTLSNKKKEYLLTEEDISKFDVRKKFIERNLVDTRYASRVVLNALQEHFRAHKIDTKVSVVRGQFTSQLRRHWGIEKTRDTYHHHAVDALIIAASSQLNLWKKQKNTLVSYSEEQLLDIETGELISDDEYKESVFKAPYQHFVDTLKSKEFEDSILFSYQVDSKFNRKISDATIYATRQAKVGKDKKDETYVLGKIKDIYTQDGYDAFMKIYKKDKSKFLMYRHDPQTFEKVIEPILENYPNKQMNEKGKEVPCNPFLKYKEEHGYIRKYSKKGNGPEIKSLKYYDSKLLGNPIDITPENSKNKVVLQSLKPWRTDVYFNKATGKYEILGLKYADLQFEKGTGTYKISQEKYNDIKKKEGVDSDSEFKFTLYKNDLLLVKDTETKEQQLFRFLSRTLPKQKHYVELKPYDKQKFEGGEALIKVLGNVANGGQCIKGLAKSNISIYKVRTDVLGNQHIIKNEGDKPKLDF

SEQ ID NO: 25 - protein, 1123 aa, Francisella tularensis
MNVKILPIAIDLDVKNTGVFSAFYQKGTSLEKLDNKNGKVYELSKDSYTLLMNNRTARRHKRRGIDRKQLVKRLFKLVWTEQLNLEWDKDTQQAISFLFNRRGFSFITDGYSTEYLNIVPEQVKAILMDIFDDYNGEDDLDSYLKLATEQESKISEIYNKLMQKILEFKLRKLCTDIKDDKVSTKTLKEITSYEFELLADYLANYSESLKTQKFSYTDKQGNLKELSYYHHDKYNIQEFLKRHATINDEILGTLLTDDFDIWNFNFEKFDFDKNEEKLQNQEDKDHTQAHLHHFVFVVNKIKSEMASGGRHRSQYFQEITNVLDENNHQEGYLKNFCENLHNKKYSNLSVKNLVNLVGNLSNLELKPLRKYFNDKIHAKADHWDEQKFTETYCHWILGEWRVGVKDQDKKDGAKYSYKDLCNELKQKVTKAGLIDFLLELDPCRTIPPYLDNNNRKPPKCQSLILNPKFLDNQYPNWQQYLQELKKLQSIQDYLDSFETDLKDLKSSKDQPYFVEYKSSNQQMASGQRDYKDLDARILQFIFDRVKASDELLLNEIYFQAKKLKQKASSELEKLESSKKLDEVIANSQLSQILKSQHTNGIFEQGTFLHLVCKYYKQRQRARDSRLYIMPEYRYDKKLDKYNNTGRFDDNNQLLTYCNHKPRQKRYQLLNDLAGVLQVSRNQLLSSVEEWFQQAQRVGEISKSQDEQIFEWLKSFKIASYCKAAVEMQKQYRGTLKNAIQTAIFRQSENINKNKNTGNQQQALSENSKDVKSLTADEKKLLKLIENIAKASQKIGESLGLNDKQIKKFNSIYSFAQIQQIAFAKRKGNANTCAVCSADNAHRMQQIKITELVEDNKDNIILSAKAQRLPAIPTRIVDGAVKKMATILAKNIVDDNWQNIKQVLSAKHQLHIPIITESNAFEFEPALADVKGKSLKDRRKKALERISPENIFKDKNNRIKEFAKGISAYSGANLTDGDFDGAKEELDHIIPRSHKKYGTLNDEANLICVTRDDNKNIFAIDTSKWFEIETPSDLRDIGVATIQYKIDNNSRPKVRVKLDYVIDDDSKINYFMNHSLLKSRYPDKVLEILKQSTIIEFESSGFNKTIKEMLGMTLAGIYNETSNN

SEQ ID NO: 26 - protein, 1436 aa, Bacteroides fragilis
MKRILGLDLGTNSIGWALVNEAENKDERSSIVKLGVRVNPLTVDELTNFEKGKSITTNADRTLKRGMRRNLQRYKLRRETLTEVLKEHKLITEDTILSENGNRTTFETYRLRAKAVTEEISLEEFARVLLMINKKRGYKSSRKAKGVEEGTLIDGMDIARELYNNNLTPGELCLQLLDAGKKFLPDFYRSDLQNELDRIWEKQKEYYPEILTDVLKEELRGKKRDAVWAICAKYFVWKENYTEWNKEKGKTEQQEREHKLEGIYSKRKRDEAKRENLQWRVNGLKEKLSLEQLVIVFQEMNTQINNSSGYLGAISDRSKELYFNKQTVGQYQMEMLDKNPNASLRNMVFYRQDYLDEFNMLWEKQAVYHKELTEELKKEIRDIIIFYQRRLKSQKGLIGFCEFESRQIEVDIDGKKKIKTVGNRVISRSSPLFQEFKIWQILNNIEVTVVGKKRKRRKLKENYSALFEELNDAEQLELNGSRRLCQEEKELLAQELFIRDKMTKSEVLKLLFDNPQELDLNFKTIDGNKTGYALFQAYSKMIEMSGHEPVDFKKPVEKVVEYIKAVFDLLNWNTDILGFNSNEELDNQPYYKLWHLLYSFEGDNTPTGNGRLIQKMTELYGFEKEYATILANVSFQDDYGSLSAKAIHKILPHLKEGNRYDVACVYAGYRHSESSLTREEIANKVLKDRLMLLPKNSLHNPVVEKILNQMVNVINVIIDIYGKPDEIRVELARELKKNAKEREELTKSIAQTTKAHEEYKTLLQTEFGLTNVSRTDILRYKLYKELESCGYKTLYSNTYISREKLFSKEFDIEHIIPQARLFDDSFSNKTLEARSVNIEKGNKTAYDFVKEKFGESGADNSLEHYLNNIEDLFKSGKISKTKYNKLKMAEQDIPDGFIERDLRNTQYIAKKALSMLNEISHRVVATSGSVTDKLREDWQLIDVMKELNWEKYKALGLVEYFEDRDGRQIGRIKDWTKRNDHRHHAMDALTVAFTKDVFIQYFNNKNASLDPNANEHAIKNKYFQNGRAIAPMPLREFRAEAKKHLENTLISIKAKNKVITGNINKTRKKGGVNKNMQQTPRGQLHLETIYGSGKQYLTKEEKVNASFDMRKIGTVSKSAYRDALLKRLYENDNDPKKAFAGKNSLDKQPIWLDKEQMRKVPEKVKIVTLEAIYTIRKEISPDLKVDKVIDVGVRKILIDRLNEYGNDAKKAFSNLDKNPIWLNKEKGISIKRVTISGISNAQSLHVKKDKDGKPILDENGRNIPVDFVNTGNNHHVAVYYRPVIDKRGQLVVDEAGNPKYELEEVVVSFFEAVTRANLGLPIIDKDYKTTEGWQFLFSMKQNEYFVFPNEKTGFNPKEIDLLDVENYGLISPNLFRVQKFSLKNYVFRHHLETTIKDTSSILRGITWIDFRSSKGLDTIVKVRVNHIGQIVSVGEY

SEQ ID NO: 27 - protein, 1314 aa, Mycoplasma synoviae
MLRLYCANNLVLNNVQNLWKYLLLLIFDKKIIFLFKIKVILIRRYMENNNKEKIVIGFDLGVASVGWSIVNAETKEVIDLGVRLFSEPEKADYRRAKRTTRRLLRRKKFKREKFHKLILKNAEIFGLQSRNEILNVYKDQSSKYRNILKLKINALKEEIKPSELVWILRDYLQNRGYFYKNEKLTDEFVSNSFPSKKLHEHYEKYGFFRGSVKLDNKLDNKKDKAKEKDEEEESDAKKESEELIFSNKQWINEIVKVFENQSYLTESFKEEYLKLFNYVRPFNKGPGSKNSRTAYGVFSTDIDPETNKFKDYSNIWDKTIGKCSLFEEEIRAPKNLPSALIFNLQNEICTIKNEFTEFKNWWLNAEQKSEILKFVFTELFNWKDKKYSDKKFNKNLQDKIKKYLLNFALENFNLNEEILKNRDLENDTVLGLKGVKYYEKSNATADAALEFSSLKPLYVFIKFLKEKKLDLNYLLGLENTEILYFLDSIYLAISYSSDLKERNEWFKKLLKELYPKIKNNNLEIIENVEDIFEITDQEKFESFSKTHSLSREAFNHIIPLLLSNNEGKNYESLKHSNEELKKRTEKAELKAQQNQKYLKDNFLKEALVPLSVKTSVLQAIKIFNQIIKNFGKKYEISQVVIEMARELTKPNLEKLLNNATNSNIKILKEKLDQTEKFDDFTKKKFIDKIENSVVFRNKLFLWFEQDRKDPYTQLDIKINEIEDETEIDHVIPYSKSADDSWFNKLLVKKSTNQLKKNKTVWEYYQNESDPEAKWNKFVAWAKRIYLVQKSDKESKDNSEKNSIFKNKKPNLKFKNITKKLFDPYKDLGFLARNLNDTRYATKVFRDQLNNYSKHHSKDDENKLFKVVCMNGSITSFLRKSMWRKNEEQVYRFNFWKKDRDQFFHHAVDASIIAIFSLLTKTLYNKLRVYESYDVQRREDGVYLINKETGEVKKADKDYWKDQHNFLKIRENAIEIKNVLNNVDFQNQVRYSRKANTKLNTQLFNETLYGVKEFENNFYKLEKVNLFSRKDLRKFILEDLNEESEKNKKNENGSRKRILTEKYIVDEILQILENEEFKDSKSDINALNKYMDSLPSKFSEFFSQDFINKCKKENSLILTFDAIKHNDPKKVIKIKNLKFFREDATLKNKQAVHKDSKNQIKSFYESYKCVGFIWLKNKNDLEESIFVPINSRVIHFGDKDKDIFDFDSYNKEKLLNEINLKRPENKKFNSINEIEFVKFVKPGALLLNFENQQIYYISTLESSSLRAKIKLLNKMDKGKAVSMKKITNPDEYKIIEHVNPLGINLNWTKKLENNN

SEQ ID NO: 28 - protein, 1368 aa, Streptococcus pyogenes
MDKKYSIGLDIGTNSVGWAVITDDYKVPSKKFKVLGNTDRHSIKKNLIGALLFDSGETAEATRLKRTARRRYTRRKNRICYLQEIFSNEMAKVDDSFFHRLEESFLVEEDKKHERHPIFGNIVDEVAYHEKYPTIYHLRKKLVDSTDKADLRLIYLALAHMIKFRGHFLIEGDLNPDNSDVDKLFIQLVQTYNQLFEENPINASGVDAKAILSARLSKSRRLENLIAQLPGEKKNGLFGNLIALSLGLTPNFKSNFDLAEDAKLQLSKDTYDDDLDNLLAQIGDQYADLFLAAKNLSDAILLSDILRLNSEITKAPLSASMIKRYDEHHQDLTLLKALVRQQLPEKYKEIFFDQSKNGYAGYIDGGASQEEFYKFIKPILEKMDGTEELLAKLNREDLLRKQRTFDNGSIPHQIHLGELHAILRRQEDFYPFLKDNREKIEKILTFRIPYYVGPLARGNSRFAWMTRKSEETITPWNFEEVVDKGASAQSFIERMTNFDKNLPNEKVLPKHSLLYEYFTVYNELTKVKYVTEGMRKPAFLSGEQKKAIVDLLFKTNRKVTVKQLKEDYFKKIECFDSVEISGVEDRFNASLGTYHDLLKIIKDKDFLDNEENEDILEDIVLTLTLFEDREMIEERLKTYAHLFDDKVMKQLKRRRYTGWGRLSRKLINGIRDKQSGKTILDFLKSDGFANRNFMQLIHDDSLTFKEDIQKAQVSGQGDSLHEHIANLAGSPAIKKGILQTVKVVDELVKVMGRHKPENIVIEMARENQTTQKGQKNSRERMKRIEEGIKELGSQILKEHPVENTQLQNEKLYLYYLQNGRDMYVDQELDINRLSDYDVDHIVPQSFIKDDSIDNKVLTRSDKNRGKSNNVPSEEVVKKMKNYWRQLLNAKLITQRKFDNLTKAERGGLSELDKAGFIKRQLVETRQITKHVAQILDSRMNTKYDENDKLIREVKVITLKSKLVSDFRKDFQFYKVREINNYHHAHDAYLNAVVGTALIKKYPKLESEFVYGDYKVYDVRKMIAKSEQEIGKATAKYFFYSNIMNFFKTEITLANGEIRKRPLIETNGETGEIVWDKGRDFATVRKVLSMPQVNIVKKTEVQTGGFSKESILPKRNSDKLIARKKDWDPKKYGGFDSPTVAYSVLVVAKVEKGKSKKLKSVKELLGITIMERSSFEKNPIDFLEAKGYKEVRKDLIVKLPKYSLFELENGRKRMLASAGELQKGNELALPSKYVNFLYLASHYEKLKGSPEDNEQKQLFVEQHKHYLDEIIEQISEFSKRVILADANLDKVLSAYNKHRDKPIREQAENIIHLFTLTNLGAPAAFKYFDTTIDRKRYTSTKEVLDATFIHQSITGLYETRIDLSQLGGD

SEQ ID NO: 29 - protein, 1368 aa, Streptococcus pyogenes
MDKKYSIGLDIGTNSVGWAVITDDYKVPSKKFKVLGNTDRHSIKKNLIGALLFDSGETAEATRLKRTARRRYTRRKNRICYLQEIFSNEMAKVDDSFFHRLEESFLVEEDKKHERHPIFGNIVDEVAYHEKYPTIYHLRKKLVDSTDKADLRLIYLALAHMIKFRGHFLIEGDLNPDNSDVDKLFIQLVQTYNQLFEENPINASGVDAKAILSARLSKSRRLENLIAQLPGEKKNGLFGNLIALSLGLTPNFKSNFDLAEDAKLQLSKDTYDDDLDNLLAQIGDQYADLFLAAKNLSDAILLSDILRVNTEITKAPLSASMIKRYDEHHQDLTLLKALVRQQLPEKYKEIFFDQSKNGYAGYIDGGASQEEFYKFIKPILEKMDGTEELLVKLNREDLLRKQRTFDNGSIPHQIHLGELHAILRRQEDFYPFLKDNREKIEKILTFRIPYYVGPLARGNSRFAWMTRKSEETITPWNFEEVVDKGASAQSFIERMTNFDKNLPNEKVLPKHSLLYEYFTVYNELTKVKYVTEGMRKPAFLSGEQKKAIVDLLFKTNRKVTVKQLKEDYFKKIECFDSVEISGVEDRFNASLGTYHDLLKIIKDKDFLDNEENEDILEDIVLTLTLFEDREMIEERLKTYAHLFDDKVMKQLKRRRYTGWGRLSRKLINGIRDKQSGKTILDFLKSDGFANRNFMQLIHDDSLTFKEDIQKAQVSGQGDSLHEHIANLAGSPAIKKGILQTVKVVDELVKVMGRHKPENIVIEMARENQTTQKGQKNSRERMKRIEEGIKELGSQILKEHPVENTQLQNEKLYLYYLQNGRDMYVDQELDINRLSDYDVDHIVPQSFLKDDSIDNKVLTRSDKNRGKSDNVPSEEVVKKMKNYWRQLLNAKLITQRKFDNLTKAERGGLSELDKAGFIKRQLVETRQITKHVAQILDSRMNTKYDENDKLIREVKVITLKSKLVSDFRKDFQFYKVREINNYHHAHDAYLNAVVGTALIKKYPKLESEFVYGDYKVYDVRKMIAKSEQEIGKATAKYFFYSNIMNFFKTEITLANGEIRKRPLIETNGETGEIVWDKGRDFATVRKVLSMPQVNIVKKTEVQTGGFSKESILPKRNSDKLIARKKDWDPKKYGGFDSPTVAYSVLVVAKVEKGKSKKLKSVKELLGITIMERSSFEKNPIDFLEAKGYKEVKKDLIIKLPKYSLFELENGRKRMLASAGELQKGNELALPSKYVNFLYLASHYEKLKGSPEDNEQKQLFVEQHKHYLDEIIEQISEFSKRVILADANLDKVLSAYNKHRDKPIREQAENIIHLFTLTNLGAPAAFKYFDTTIDRKRYTSTKEVLDATLIHQSITGLYETRIDLSQLGGD

SEQ ID NO: 30 - protein, 1370 aa, Streptococcus agalactiae; identical to SEQ ID NO: 11

SEQ ID NO: 31 - protein, 1173 aa, Rhodospirillum rubrum
MRPIEPWILGLDIGTDSLGWAVFSCEEKGPPTAKELLGGGVRLFDSGRDAKDHTSRQAERGAFRRARRQTRTWPWRRDRLIALFQAAGLTPPAAETRQIALALRREAVSRPLAPDALWAALLHLAHHRGFRSNRIDKRERAAAKALAKAKPAKATAKATAPAKEADDEAGFWEGAEAALRQRMAASGAPTVGALLADDLDRGQPVRMRYNQSDRDGVVAPTRALIAEELAEIVARQSSAYPGLDWPAVTRLVLDQRPLRSKGAGPCAFLPGEDRALRALPTVQDFIIRQTLANLRLPSTSADEPRPLTDEEHAKALALLSTARFVEWPALRRALGLKRGVKFTAETERNGAKQAARGTAGNLTEAILAPLIPGWSGWDLDRKDRVFSDLWAARQDRSALLALIGDPRGPTRVTEDETAEAVADAIQIVLPTGRASLSAKAARAIAQAMAPGIGYDEAVTLALGLHHSHRPRQERLARLPYYAAALPDVGLDGDPVGPPPAEDDGAAAEAYYGRIGNISVHIALNETRKIVNALLHRHGPILRLVMVETTRELKAGADERKRMIAEQAERERENAEIDVELRKSDRWMANARERRQRVRLARRQNNLCPYTSTPIGHADLLGDAYDIDHVIPLARGGRDSLDNMVLCQSDANKTKGDKTPWEAFHDKPGWIAQRDDFLARLDPQTAKALAWRFADDAGERVARKSAEDEDQGFLPRQLTDTGYIARVALRYLSLVTNEPNAVVATNGRLTGLLRLAWDITPGPAPRDLLPTPRDALRDDTAARRFLDGLTPPPLAKAVEGAVQARLAALGRSRVADAGLADALGLTLASLGGGGKNRADHRHHFIDAAMIAVTTRGLINQINQASGAGRILDLRKWPRTNFEPPYPTFRAEVMKQWDHIHPSIRPAHRDGGSLHAATVFGVRNRPDARVLVQRKPVEKLFLDANAKPLPADKIAEIIDGFASPRMAKRFKALLARYQAAHPEVPPALAALAVARDPAFGPRGMTANTVIAGRSDGDGEDAGLITPFRANPKAAVRTMGNAVYEVWEIQVKGRPRWTHRVLTRFDRTQPAPPPPPENARLVMRLRRGDLVYWPLESGDRLFLVKKMAVDGRLALWPARLATGKATALYAQLSCPNINLNGDQGYCVQSAEGIRKEKIRTTSCTALGRLRLSKKAT

SEQ ID NO: 32 - protein, 997 aa, Maritimibacter alkaliphilus
MKVLVDAGLMPSDPAAAKALETLDPYELRATGLDVMLPLTHLGRAVFHLNQRRGFKSNRKTDRGDNESGKIKDATKRLTWAMQEAGARTYGEFLHMRRARASDPRQVPSVRTRLSVASRGGPDSKEEAGYDFYPERAHLEDEFHALWSAQAAFHPDLTCELRDVVFEKIFYQRPLKEPKVGLCLFTAEERLPKAHPLTGRRVLYETVNQLRVTADGRTTRPLTLEERDMIVYALDNKKPVKSLSSMHLKLVALGKLVKLKDGERFTLESGVRDAIACDPIRATMGHPDGFGPAWSRLDWQAQWALIEKLRQVQSDDDFASLVAWLGATHNLSEDHAKRVANLHLPEGYGRLGLTATEAILCNLKAEVCTYSQAVERWGKHHSNQRTGECLEALPYYGEVLDRHVIPGTYNEDDDDVTRYGRITNPTVHIGLNQLRRLVNRIIATYGKPDQIVVELARELKQSEAQKSEALKKIRDTTADAIRRGRQLEEIGQKNTGANRLLLRLWEDLGPAVGPRCCPYTGKPISVTMLFDGACDVDHILPYSRTLDDSFANRTICLREANRQKGDRTPWEAWGGSDQWDAIEANLKDLPENKRKRFAPDAMERFEGERDFLDRALVDTQYLARISRAYLDTLFTEGGHVWVVPGRMTEMLRRHWGLNALLSDKDRGAGKVKNRTDHRHHAIDAAVIAATDHSLVNRISKAAGQGESAGQSAELIARDTPEPWEGFRNDISAQIARIVVSHRADHGRIDVEGRKHGKDSTAGRLHNDTAYGIVDDHTVVSRTPLLSLKPGDIEVTTKGKNIRDTQLQKALSVATTGKDGKGFEEALRNFAEKEGPYQGIRRVRLIETLQSSARVEVGSDEDGQPLKAYKGDSNHCYDLWKLPDGKVVPHVVSTYEAHAGTDKRPHPAAKRILRVFKKDMVAIEQDDQTAIFYVQKLDRANGLFLAPHLEANADARHRNPNDAFKFLQMGAGSVVRNKLRRVYVDEIGRIKDPGPPKH

SEQ ID NO: 33 - protein, 1027 aa, Blastopirellula marina
MFSESGDQPSLVDCGVRIFPEGVERDQQGGEKSKSQSRRVARGIRRQVRRRAQRLRHLKHALITTGLFPADVVDQQEVLASNPYELRSRALSEKLEPYEIGRILLHLAKRRGFLSNRTTDRSGGNELKGILAEMTQLQGEIAAHGCQTLGQYLHQLGDDGETFAQRLRGRHTLRAMYEDEFEKIWERQASYYPALLTEELRGGEEGKQSYPLVPTARRKSESLLKRFGLHGLLFFQRKMYWPKSVIGRCDLEPKEKRCPKADRLAQRFRILQEVNNLRLISPADRKEYTFAEFVGAGADKKLVDYLCEAKERTFPQIRKKFKLPETISFNYERGERSKLQGHETDAHFNGKKGLGKRRWSEIAEDVKDHIIQIVLEEDREDVALRKLTQDCSLTVEEAHKAMALHLPAGYSQYSRVAISRLLPHLELGKLLMGNDASDSAMHAAGYLRPDEREVRQYDLLPEPPDIPNPLVRQALYEVRKVINAIIREYGALGTIRVELAREAKKSAEQRTQIRIANAKRERENAAIAKTLQEMSPAIRPTRRNIQRYLLWKDQGGVCIYTGKVISQAQLFDSGEVDVDHILPRWRSLDDSMANKVIAHRSANNEKGDRTPWEWLGHDKPRFDELLLRAQRLPYGKRQRFIQKEVELTNFVERQLRDTTYVSRLVVQYLKGLGVPITTVKGPMTAELRHHWGLNALLNEDGSQKKNRSDHRHHAIDAIVIGLTDAKRLHALANARGKDLQPPWSEFRSDVATALGRMAVSHRVRRRIQGALHEETIYGPTQKAAQPTSTDQRPWAKDWIEDSQIVVRRKSVSDLTNTKHLAKIRDVTIRKILEDHLRRQKVDPTKPGVIPKDAFAGSNAPQMPSGVPIKKVRLVERGETWRKIGSGEASKFIKPGSNHHISYFAISRKGRESWKAHVTIMLDAACIAKESINNGKIVNRSIGDQGRFLMSLSIGEMFEITNNGGEILLCVVRKIDQSGRIYYKIHDDARESMDLKKDNLYMSPSKMQQFDARKVTVTPLGKIRNAND

SEQ ID NO: 34 - protein, 158 aa, Francisella tularensis
MIDFLLELDPCITIPPYLDNNNRKPPKCQSLILNPKFLDNQYPNWQQYLQELKKLQSIQDYLDSFETDLKDLKSSKDQPYFVEYKSSNQQMASGQRDYKDLDARILQFIFDRVKASDELLLSEIYFQAKKLKQKASSELEKLESSKKLDEVIANSQLS

SEQ ID NO: 35 - protein, 393 aa, Francisella tularensis
MNVKILPIAIDLDVKNTGVFSAFYQKGTSLEKLDNKNGKVYELSKDSYTLLMNNRTAQRHQRRGIDRKQLVKRLFKLVWTEQLNLEWDKDTQQAISFLFNRRGFSFITDGYSTEYLNIVPEQVKAILMDIFDDYNGEDDLDSYLKLATEQESKISEIYNKLMQKILEFKLRKLCTDIKDDKVSTKTLKEITSYEFELLADYLANYSESLKTQKFSYTDKQGNLKELSYYHHDKYNIQEFLKRHATINDEILDTLLTDDFDIWNFNFEKFDFDKNEEKLQSQEDKDHTQAYFHHFVFAVNKIKSEMASGGRHRSQYFQEITNVLDENNHQEGYLKNFCENLHNKKYSNLSVKNLVNLVGNLSNLELKPLRKYFNDKNLIIGMSKSLQKLIATGY

SEQ ID NO: 36 - protein, 1066 aa, Rhodopseudomonas palustris
MSERVVRRILGIDLGIASCGWGVVDISGAGGGIIATGVRCFDAPLIDKTGEPKSATRRTARGQRRIVRRRRQRMNGVRRLLCEFGLLPDPRPDALNQAMRRISTASAAAQVTPWTLRAAAHQRLLSNEELAVVLGHIARHRGFRSNAKNEAGANAADETSKMKKAMEATREGLAKYHAFGDMIANDPKFANRKRNRDKDYSHTAKRSDLEDEVRAILRAQLRFGSAAATETLAQTFADVAFFQRPLQDSEDRVGDCPFEPGQKRAARRAPSFELFRFLSRLANLKLAVGRSPERRLTAEEIALAAKGFGETKKTITFKSLREALDLDPNARFSGIGKDKEASLDVVARTGGAAYGTKTLKDALGDAPWRSLSRTPETLDRIAEILSFREDITSIRNGLEDLGLDSLVVEALMQAAANGDFKEFTRAGHISARAARNIIPGLREGLVYSEACARVGYDHAARLSVPLDQVGSPVTRKALSEALKQVRAVAREYGPIDYFHIELARSVGKSAEERKQLTDGIEARNVEKAKRRKQAEEHLGRAPSDDELLRYELAKEQNFKCIYSGDAIDPAGVAANDTRYQVDHILPWSRFGDDSYLNKTLCTARSNQNKRGRTPFEWFEADKTDVEWMEYVARVENLQEVKGRKKRNYSIKDAAAIEDKFKARNLTDTQWATRLLADELSRMFPPRECERAICGRADGGNDGLTIVEERRVFTRPGAITSKLRRAWGLEGLKKQDGKRVEDDRHHAVDALVLAATTESLLQRLTVEVQRREREGRPDDIFHCAEPWRGFRADVRRTVYGSETMPGIFVSRAERRRARGKAHDATIKQIREIEGERLVFERKPVEKLTDKDLEKIPIPKPYGQVSDPKRLRDELVESLRAWIAAGKPKDRPPLSPKGDVIRKVRIQTNDKVSVEINGGTVDRGDMARVDVFRKKNKKAVWEYYVVPIYPHQIVALNDPPDRAVIAYAEDKDWKEIDSSYEFLWSLFGLSYVEISKANGECIDGYFRGLHRGTGAASVCKHISLGKDATVSGIGLKTLASFKKFTIDRLGRKFEIPREVRTWRGEACT

SEQ ID NO: 37 - protein, 1149 aa, Lactobacillus salivarius
MERYHIGLDIGTSSIGWAVIGDDFKIKRKKGKNLIGVRLFKEGDTAAERRGFRTQRRRLNRRKWRLKLLEEIFDPYMAEVDKYFFARLKESNLSPKDSNKKYLGSLLFPDISDSNFYDKYPTIYHLRRDLMEKDKKFDLREIYLAIHHIVKYRGNFLEKVPAKNYKNSGASIGFLLEEVNDLYGNIIGNEDVAILDNDKFEDVEKIILNDEIRNIDKQKNVGRLLVKDKKEKNIVTAFSKAIFGYKFNLEDLLLIESDEKNKLTFNDENIDDIFNELSHSLNDNQMDLLTKTREIYFKFKLNMIVPTGYTISESMIEKYEMHKAHLKMYKEFINTLNAKDRKILKNAYSDYINNEKAKAANAQENFYKTVKKTIKENDSDTAKKIIGLIDEGNFMPKQRTGENGVIPHQLHQIELDRIIENQAKYYPWLAEENPVEKNRKFAKYKLDELVTFRVPYYVGPLIDKTESNKNEKETKFAWMVRKAKGTITPWNFENLVDRTESANRFIKRMTSKDTYIIGEDVLPASSLLYEKYKVLNELNNIKVNKKKLDVEQKQHVYLDLFTTRKNVTKDDLATSLNCDVESITGLTDNKKFNSSLSSYIDLKAILGNIVDDYSKNEDLEKIIEYSTIFEDGNIYKEKLSEISWLTDEQIEKLSNIHFKGWGRLSKKLLTQITNENGERIIDTLWNTSNNFIQVISDESIQAKLAEINGEYANKYNLEDILDEAYTSPQNKKAIRQVMKVVEDIEKAMKCEPTSIAIEFTREKRKSKLTNTRYKKISETYEKITDELISEYELGKLQSELDSKVNNMRDRYYLYFMQLGRDMYTGEKMNIDELHQKYDIDHILPQSFIKDDSLNNRVLTSKSVNIKEKSDKTAADLYAAKMGDFWRKLRKQGLMTEQKYKNLLTRTDSINKYTKQSFIKRQLVETSQVVKLAANILQDKYRNTKIIEIRARLNSDLRKKYELIKNREVNDYHHAIDGYLTTFVGQYLYKVYPKLRSYFVYDDFKKLDSNYLKHMDKFNFIWKLEDKKAEDVYDKVNDEFVLNVPEMKEYIRKIYNYKYMLVSKEVTTKNGAFYDQTKYNAKTINLIPIKKDKPTNIYGGYKGKVSSYMMLVKIQKKKEVIYKFVGVPRLWTDELDRLIDTDEKKALLKK

SEQ ID NO: 38 - protein, 1064 aa, Rhodopseudomonas palustris
MSECVTRRILGIDLGIASCGWGVIEVGEASGSIIASGVRCFDAPLIDKTGEPKSATRRTARGQRRIIRRRRQRMNAVRRLLAEFGVLTGRSPDALHQALLRLSQSVAGSQVTPWTLRAAAHERKLTNDELAVVLGHIARHRGFRSNSKNDGGANAADETSKMKKAMETTREGLARYHSFGAMIASDPKFADRKRNRDKDYSHTAKRSDLEDEVRTIFRSQTRFGSLVASEKLSQAFADAAFFQRPLQDSEDMVGSCPFEPGQKRTARRAPSFELFRFLSRLANLKLTVGRAPERRLTPDEIALAAKGFGETKKSITFKSLREALDLDPNARFSGVAKEKESTLDVAARTGGAAYGTKTLKDALGDAPWRSLSRMPEKLDRIAEILSFREDMKAIRNGLEEVGLDGLVVDALMQATANGDFKDFTRAAHISALAARNIIPGLREGLVYSDACTRVGYDHAARPAVPLSQIGSPVTRKALSEALKQVRAVAREYGPIDYFHIELARSIGKSAEERKKLTDGIEARNVEKEKRRKEAAEHLGRAPSDDELLRYELAKEQNFKCIYSGDPIDPAGISANDTRYQVDHILPWSRFGDDSYVNKTLCTARSNQNKRGRTPFEWFDADKTEAEWMEYSARVEDLKEVKGRKKRNYSIKDAASVEDKFKARNLTDTQWATRLLADELKRMFPPRECERVVTVRADGGNDGLSIVEERRVFTRPGAITSKLRRAWGLEGLKKQDGKRVEDDRHHAVDALVLAATTESLLNRLTVEVQQREREGRQDDIFHCSQPWPGFRVDVQRTVYGSETMPGIFVSRAERRRARGKAHDATVKQIRDIDGERIVFERKPIEKLTDKDLERIPVPEPYGKAADPKKLRDELVENLRAWIAAGKPKDKPPRSPKGDIIRKVRIETKDKVAVEINGGTVDRGDMARVDVFRKKNKKGVWEFYVIPIYPHQIVASALPPNRAVIAYKAESEWTAIDGCFEFAWSLNPMSYLELVKSNGELIEGYFRSMDRTTGAINLSPMSTNSETIRSIGVKTLSSFRKFTVDRLGRKFEIPREVRTWRGEACT

SEQ ID NO: 39 - protein, 1166 aa, Nitrobacter hamburgensis
MHVEIDFPHFSRGDSHLAMNKNEILRGSSVLYRLGLDLGSNSLGWFVTHLEKRGDRHEPVALGPGGVRIFPDGRDPQSGTSNAVDRRMARGARKRRDRFVERRKELIAALIKYNLLPDDARERRALEVLDPYALRKTALTDTLPAHHVGRALFHLNQRRGFQSNRKTDSKQSEDGAIKQAASRLATDKGNETLGVFFADMHLRKSYEDRQTAIRAELVRLGKDHLTGNARKKIWAKVRKRLFGDEVLPRADAPHGVRARATITGTKASYDYYPTRDMLRDEFNAIWAGQSAHHATITDEARTEIEHIIFYQRPLKPAIVGKCTLDPATRPFKEDPEGYRAPWSHPLAQRFRILSEARNLEIRDTGKGSRRLTKEQSDLVVAALLANREVKFDKLRTLLKLPAEARFNLESDRRAALDGDQTAARLSDKKGFNKAWRGFPPERQIAIVARLEETEDENELIAWLEKECALDGAAAARVANTTLPDGHCRLGLRAIKKIVPIMQDGLDEDGVAGAGYHIAAKRAGYDHAKLPTGEQLGRLPYYGQWLQDAVVGSGDARDQKEKQYGQFPNPTVHIGLGQLRRVVNDLIDKYGPPTEISIEFTRALKLSEQQKAERQREQRRNQDKNKARAEELAKFGRPANPRNLLKMRLWEELAHDPLDRKCVYTGEQISIERLLSDEVDIDHILPVAMTLDDSPANKIICMRYANRHKRKQTPSEAFGSSPTLQGHRYNWDDIAARATGLPRNKRWRFDANAREEFDKRGGFLARQLNETGWLARLAKQYLGAVTDPNQIWVVPGRLTSMLRGKWGLNGLLPSDNYAGVQDKAEEFLASTDDMEFSGVKNRADHRHHAIDGLVTALTDRSLLWKMANAYDEEHEKFVIEPPWPTMRDDLKAALEKMVVSHKPDHGIEGKLHEDSAYGFVKPLDATGLKEEEAGNLVYRKAIESLNENEVDRIRDIQLRTIVRDHVNVEKTKGVALADALRQLQAPSDDYPQFKHGLRHVRILKKEKGDYLVPIANRASGVAYKAYSAGENFCVEVFETAGGKWDGEAVRRFDANKKNAGPKIAHAPQWRDANEGAKLVMRIHKGDLIRLDHEGRARIMVVHRLDAAAGRFKLADHNETGNLDKRHATNNDIDPFRWLMASYNTLKKLAAVPVRVDELGRVWRVMPN

SEQ ID NO: 40 - protein, 641 aa, Nitrobacter hamburgensis
MHKRNSRSYRLGLDLGSNSLGWFVTHLEKRGDRYEPVALDPGGVRIFPDGRDPQSGMSNAVDRRMARGARKRRDRFVDPYALRKAALTNALPAHRVGRAIFHLNQRRGFQSNRKTDRKQSEDGAIKQAASKLKARMHEEAAPTLGAFFADMHLRKSYDDQQTAIRAELVRLGKDHLTGNARKKVWAKVRKRLFGDEVLRPKDTSDGARARATTTGTKASYDFYPTRAMLLDEFNAIWAAQREHHLAMTDEAKAEIEHIIFYHRPLKPAIVGKCTLDPATRPFKEDPEGYRAPWSHPLAQRFRILSEARNLEIRETGKTSRRLTKDQSDLVVAALLANREVKFDKLRTLLKLPAEARFNLESDRRSTATRPPHGCRTRRASIRRGAGFLRNGRSRSSPDWKKPKTKTNCSHGSKWNAHLTAQRPRASPIRRCRTAIAGSACAQSKRSCRSCRTSSMRMALRAPAITSWPSVPATTIPVDTFQQGGNAFGRILSVVTIELFAITDRVDPVQEQDARCFALRIAECRSDGLQHFAEVSLGLPPRNAAQDQRHSAGLCQSSCVGRFVPGTPCRRTPRSTSLHGKEPSAHAFGSTARSRPQLPASPRPCMSFRDGTSSSPARMPETLDRCAISRSNRSSVCRAERL

SEQ ID NO: 41 - protein, 1368 aa, Streptococcus pyogenes
MDKKYSIGLDIGTNSVGWAVITDDYKVPSKKFKVLGNTDRHSIKKNLIGALLFDSGEIAEATRLKRTARRRYTRRKNRICYLQEIFSNEMAKVDDSFFHRLEESFLVEEDKKHERHPIFGNIVDEVAYHEKYPTIYHLRKKLVDSTDKADLRLIYLALAHMIKFRGHFLIEGDLNPDNSDVDKLFIQLVQTYNQLFEENPINASGVDAKAILSARLSKSRRLENLIAQLPGEKKNGLFGNLIALSLGLTPNFKSNFDLAEDAKLQLSKDTYDDDLDNLLAQIGDQYADLFLAAKNLSDAILLSDILRLNSEITKAPLSASMIKRYDEHHQDLTLLKALVRQQLPEKYKEIFFDQSKNGYAGYIDGGASQEEFYKFIKPILEKMDGTEELLAKLNREDLLRKQRTFDNGSIPHQIHLGELHAILRRQEDFYPFLKDNREKIEKILTFRIPYYVGPLARGNSRFAWMTRKSEETITPWNFEEVVDKGASAQSFIERMTNFDKNLPNEKVLPKHSLLYEYFTVYNELTKVKYVTEGMRKPAFLSGEQKKAIVDLLFKTNRKVTVKQLKEDYFKKIECFDSVEISGVEDRFNASLGTYHDLLKIIKDKDFLDNEENEDILEDIVLTLTLFEDREMIEERLKTYAHLFDDKVMKQLKRRRYTVWGRLSRKLINGIRDKQSGKTILDFLKSDGFANRNFMQLIHDDSLTFKEDIQKAQVSGQGDSLHEHIANLAGSPAIKKGILQTVKVVDELVKVMGRHKPENIVIEMARENQTTQKGQKNSRERMKRIEEGIKELGSQILKEHPVENTQLQNEKLYLYYLQNGRDMYVDQELDINRLSDYDVDHIVPQSFIKDDSIDNKVLTRSDKNRGKSDNVPSEEVVKKMKNYWRQLLNAKLITQRKFDNLTKAERGGLSELDKAGFIKRQLVETRQITKHVAQILDSRMNTKYDENDKLIREVKVITLKSKLVSDFRKDFQFYKVREINNYHHAHDAYLNAVVGTALIKKYPKLESEFVYGDYKVYDVRKMLAKSEQEIGKATAKYFFYSNIMNFFKTEITLANGEIRKRPLIETNGETGEIVWDKGRDFATVRKVLSMPQVNIVKKTEVQTGGFSKESILPKRNSDKLIARKKDWDPKKYGGFDSPTVAYSVLVVAKVEKGKSKKLKSVKELLGITIMERSSFEKNPIDFLEAKGYKEVRKDLIIKLPKYSLFELENGRKRMLASAGELQKGNELALPSKYVNFLYLASHYEKLKGSPEDNEQKQLFVEQHKHYLDEIIEQISEFSKRVILADANLDKVLSAYNKHRDKPIREQAENIIHLFTLTNLGAPTAFKYFDTTIDRKRYTSTKEVLDATFIHQSITGLYETRIDLSQLGGD

SEQ ID NO: 42 - protein, 1368 aa, Streptococcus pyogenes
MDKKYSIGLDIGTNSVGWAVITDDYKVPSKKFKVLGNTDRHSIKKNLIGALLFDSGETAEATRLKRTARRRYTRRKNRICYLQEIFSNEMAKVDDSFFHRLEESFLVEEDKKHERHPIFGNIVDEVAYHEKYPTIYHLRKKLVDSTDKADLRLIYLALAHMIKFRGHFLIEGDLNPDNSDVDKLFIQLVQTYNQLFEENPINASGVDAKAILSARLSKSRRLENLIAQLPGEKKNGLFGNLIALSLGLTPNFKSNFDLAEDAKLQLSKDTYDDDLDNLLAQIGDQYADLFLAAKNLSDAILLSDILRLNSEITKAPLSASMIKRYDEHHQDLTLLKALVRQQLPEKYKEIFFDQSKNGYAGYIDGGASQEEFYKFIKPILEKMDGTEELLAKLNREDLLRKQRTFDNGSIPHQIHLGELHAILRRQEDFYPFLKDNREKIEKILTFRIPYYVGPLARGNSRFAWMTRKSEETITPWNFEEVVDKGASAQSFIERMTNFDKNLPNEKVLPKHSLLYEYFTVYNELTKVKYVTEGMRKPAFLSGEQKKAIVDLLFKTNRKVTVKQLKEDYFKKIECFDSVEISGVEDRFNASLGTYHDLLKIIKDKDFLDNEENEDILEDIVLTLTLFEDREMIEERLKTYAHLFDDKVMKQLKRRRYTGWGRLSRKLINGIRDKQSGKTILDFLKSDGFANRNFMQLIHDDSLTFKEDIQKAQVSGQGDSLHEHIANLAGSPAIKKGILQTVKVVDELVKVMGRHKPENIVIEMARENQTTQKGQKNSRERMKRIEEGIKELGSQILKEHPVENTQLQNEKLYLYYLQNGRDMYVDQELDINRLSDYDVDHIVPQSFIKDDSIDNKVLTRSDKNRGKSDNVPSEEVVKKMKNYWRQLLNAKLITQRKFDNLTKAERGGLSELDKAGFIKRQLVETRQITKHVAQILDSRMNTKYDENDKLIREVKVITLKSKLVSDFRKDFQFYKVREINNYHHAHDAYLNAVVGTALIKKYPKLESEFVYGDYKVYDVRKMIAKSEQEIGKATAKYFFYSNIMNFFKTEITLANGEIRKRPLIETNGETGEIVWDKGRDFATVRKVLSMPQVNIVKKTEVQTGGFSKESILPKRNSDKLIARKKDWDPKKYGGFDSPTVAYSVLVVAKVEKGKSKKLKSVKELLGLTIMERSSFEKNPIDFLEAKGYKEVKKDLIIKLPKYSLFELENGRKRMLASAGELQKGNELALPSKYVNFLYLASHYEKLKGSPEDNEQKQLFVEQHKHYLDEIIEQISEFSKRVILADANLDKVLSAYNKHRDKPIREQAENIIHLFTLTNLGAPAAFKYFDTTIDRKRYTSTKEVLDATLIHQSITGLYETRIDLSQLGGD

SEQ ID NO: 43 - protein, 1368 aa, Streptococcus pyogenes
MDKKYSIGLDIGTNSVGWAVITDDYKVPSKKFKVLGNTDRHSIKKNLIGALLFDSGEIAEATRLKRTARRRYTRRKNRICYLQEIFSNEMAKVDDSFFHRLEESFLVEEDKKHERHPIFGNIVDEVAYHEKYPTIYHLRKKLVDSTDKADLRLIYLALAHMIKFRGHFLIEGDLNPDNSDVDKLFIQLVQTYNQLFEENPINASGVDAKAILSARLSKSRRLENLIAQLPGEKKNGLFGNLIALSLGLTPNFKSNFDLAEDAKLQLSKDTYDDDLDNLLAQIGDQYADLFLAAKNLSDAILLSDILRLNSEITKAPLSASMIKRYDEHHQDLTLLKALVRQQLPEKYKEIFFDQSKNGYAGYIDGGASQEEFYKFIKPILEKMDGTEELLAKLNREDLLRKQRTFDNGSIPHQIHLGELHAILRRQEDFYPFLKDNREKIEKILTFRIPYYVGPLARGNSRFAWMTRKSEETITPWNFEEVVDKGASAQSFIERMTNFDKNLPNEKVLPKHSLLYEYFTVYNELTKVKYVTEGMRKPAFLSGEQKKAIVDLLFKTNRKVTVKQLKEDYFKKIECFDSVEISGVEDRFNASLGTYHDLLKIIKDKDFLDNEENEDILEDIVLTLTLFEDREMIEERLKTYAHLFDDKVMKQLKRRRYTGWGRLSRKLINGIRDKQSGKTILDFLKSDGFANRNFMQLIHDDSLTFKEDIQKAQVSGQGDSLHEHIANLAGSPAIKKGILQTVKVVDELVKVMGRHKPENIVIEMARENQTTQKGQKNSRERMKRIEEGIKELGSQILKEHPVENTQLQNEKLYLYYLQNGRDMYVDQELDINRLSDYDVDHIVPQSFIKDDSIDNKVLTRSDKNRGKSDNVPSEEVVKKMKNYWRQLLNAKLITQRKFDNLTKAERGGLSELDKAGFIKRQLVETRQITKHVAQILDSRMNTKYDENDKLIREVKVITLKSKLVSDFRKDFQFYKVREINNYHHAHDAYLNAVVGTALIKKYPKLESEFVYGDYKVYDVRKMLAKSEQEIGKATAKYFFYSNIMNFFKTEITLANGEIRKRPLIETNGETGEIVWDKGRDFATVRKVLSMPQVNIVKKTEVQTGGFSKESILPKRNSDKLIARKKDWDPKKYGGFDSPTVAYSVLVVAKVEKGKSKKLKSVKELLGITIMERSSFEKNPIDFLEAKGYKEVRKDLIIKLPKYSLFELENGRKRMLASAGELQKGNELALPSKYVNFLYLASHYEKLKGSPEDNEQKQLFVEQHKHYLDEIIEQISEFSKRVILADANLDKVLSAYNKHRDKPIREQAENIIHLFTLTNLGAPTAFKYFDTTIDRKRYTSTKEVLDATFIHQSITGLYETRIDLSQLGGD

SEQ ID NO: 44 - protein, 1371 aa, Streptococcus pyogenes
MDKKYSIGLDIGTNSVGWAVITDDYKVPSKKFKVLGNTDRHSIKKNLIGALLFDSGETAEATRLKRTARRRYTRRKNRICYLQEIFSNEMAKVDDSFFHRLEESFLVEEDKKHERHPIFGNIVDEVAYHEKYPTIYHLRKKLADSTDKADLRLIYLALAHMIKFRGHFLIEGDLNPDNSDVDKLFIQLVQTYNQLFEENPINASRVDAKAILSARLSKSRRLENLIAQLPGEKKNGLFGNLIALSLGLTPNFKSNFDLAEDAKLQLSKDTYDDDLDNLLAQIGDQYADLFLAAKNLSDATLLSDILRVNSEITKAPLSASMIKRYDEHHQDLTLLKALVRQQLPEKYKEIFFDQSKNGYAGYIDGGASQEEFYKFIKPILEKMDGTEELLAKLNREDLLRKQRTFDNGSIPHQIHLGELHAILRRQEDFYPFLKDNREKIEKILTFRIPYYVGPLARGNSRFAWMTRKSEETITPWNFEEVVDKGASAQSFIERMTNFDKNLPNEKVLPKHSLLYEYFTVYNELTKVKYVTEGMRKPAFLSGEQKKAIVDLLFKTNRKVTVKQLKEDYFKKIECFDSVEISGVEDRFNASLGTYHDLLKIIKDKDFLDNEENEDILEDIVLTLTLFEDKEMIEERLKTYAHLFDDKVMKQLKRRHYTGWGRLSRKLINGIRDKQSGKTILDFLKSDGFANRNFIQLIHDDSLTFKEAIQKAQVSGQGHSLHEQIANLAGSPAIKKGILQSVKVVDELVKVMGHKPENIVIEMARENQTTQKGQKNSRERMKRIEEGIKELGSQILKEHPVENTQLQNEKLYLYYLQNGRDMYVDQELDINRLSDYDVDHIVPQSFIKDDSIDNKVLTRSDKNRGKSDDVPSEEVVKKMKNYWRQLLNAKLITQRKFDNLTKAERGGLSELDKAGFIKRQLVETRQITKHVAQILDSRMNTKYDENDKLIREVKVITLKSKLVSDFRKDFQFYKVREINNYHHAHDAYLNAVVGTALIKKYPKLESEFVYGDYKVYDVRKMIAKSEQEIGKATAKRFFYSNIMNFFKTEITLANGEIRKRPLIETNEETGEIVWDKGRDFATVRKVLSMPQVNIVKKTEVQTGALTNESIYARGSFDKLISRKHRFESSKYGGFGSPTVTYSVLVVAKSKVQDGKVKKIKTGKELIGITLLDKLVFEKNPLKFIEDKGYGNVQIDKCIKLPKYSLFEFENGTRRMLASVMANNNSRGDLQKANEMFLPAKLVTLLYHAHKIESSKELEHEAYILDHYNDLYQLLSYIERFASLYVDVEKNISKVKELFSNIESYSISEICSSVINLLTLTASGAPADFKFLGTTIPRKRYGSPQSILSSTLIHQSITGLYETRIDLSQLGSD

SEQ ID NO: 45 - protein, 1121 aa, Streptococcus thermophilus
MSDLVLGLDIGIGSVGVGILNKVTGEIIHKNSRIFPAAQAENNLVRRTNRQGRRLARRKKHRRVRLNRLFEESGLITDFTKISINLNPYQLRVKGLTDELSNEELFIALKNMVKHRGISYLDDASDDGNSSVGDYAQIVKENSKQLETKTPGQIQLERYQTYGQLRGDFTVEKDGKKHRLINVFPTSAYRSEALRILQTQQEFNPQITDEFINRYLEILTGKRKYYHGPGNEKSRTDYGRYRTSGETLDNIFGILIGKCTFYPDEFRAAKASYTAQEFNLLNDLNNLTVPTETKKLSKEQKNQIINYVKNEKAMGPAKLFKYIAKLLSCDVADIKGYRIDKSGKAEIHTFEAYRKMKTLETLDIEQMDRETLDKLAYVLTLNTEREGIQEALEHEFADGSFSQKQVDELVQFRKANSSIFGKGWHNFSVKLMMELIPELYETSEEQMTILTRLGKQKTTSSSNKTKYIDEKLLTEEIYNPVVAKSVRQAIKIVNAAIKEYGDFDNIVIEMARETNEDDEKKAIQKIQKANKDEKDAAMLKAANQYNGKAELPHSVFHGHKQLATKIRLWHQQGERCLYTGKTISIHDLINNSNQFEVDHILPLSITFDDSLANKVLVYATANQEKGQRTPYQALDSMDDAWSFRELKAFVRESKTLSNKKKEYLLTEEDISKFDVRKKFIERNLVDTRYASRVVLNALQEHFRAHKIDTKVSVVRGQFTSQLRRHWGIEKTRDTYHHHAVDALIIAASSQLNLWKKQKNTLVSYSEDQLLDIETGELISDDEYKESVFKAPYQHFVDTLKSKEFEDSILFSYQVDSKFNRKISDATIYATRQAKVGKDKADETYVLGKIKDIYTQDGYDAFMKIYKKDKSKFLMYRHDPQTFEKVIEPILENYPNKQINEKGKEVPCNPFLKYKEEHGYIRKYSKKGNGPEIKSLKYYDSKLGNHIDITPKDSNNKVVLQSVSPWRADVYFNKTTGKYEILGLKYADLQFEKGTGTYKISQEKYNDIKKKEGVDSDSEFKFTLYKNDLLLVKDTETKEQQLFRFLSRTMPKQKHYVELKPYDKQKFEGGEALIKVLGNVANSGQCKKGLGKSNISIYKVRTDVLGNQHIIKNEGDKPKLDF

SEQ ID NO: 46 - protein, 1388 aa, Streptococcus thermophilus
MTKPYSIGLDIGTNSVGWAVTTDNYKVPSKKMKVLGNTSKKYIKKNLLGVLLFDSGITAEGRRLKRTARRRYTRRRNRILYLQEIFSTEMATLDDAFFQRLDDSFLVPDDKRDSKYPIFGNLVEEKAYHDEFPTIYHLRKYLADSTKKADLRLVYLALAHMIKYRGHFLIEGEFNSKNNDIQKNFQDFLDTYNAIFESDLSLENSKQLEEIVKDKISKLEKKDRILKLFPGEKNSGIFSEFLKLIVGNQADFRKCFNLDEKASLHFSKESYDEDLETLLGYIGDDYSDVFLKAKKLYDAILLSGFLTVTDNETEAPLSSAMIKRYNEHKEDLALLKEYIRNISLKTYNEVFKDDTKNGYAGYIDGKTNQEDFYVYLKKLLAEFEGADYFLEKIDREDFLRKQRTFDNGSIPYQIHLQEMRAILDKQAKFYPFLAKNKERIEKILTFRIPYYVGPLARGNSDFAWSIRKRNEKITPWNFEDVIDKESSAEAFINRMTSFDLYLPEEKVLPKHSLLYETFNVYNELTKVRFIAESMRDYQFLDSKQKKDIVRLYFKDKRKVTDKDIIEYLHAIYGYDGIELKGIEKQFNSSLSTYHDLLNIINDKEFLDDSSNEAIIEEIIHTLTIFEDREMIKQRLSKFENIFDKSVLKKLSRRHYTGWGKLSAKLINGIRDEKSGNTILDYLIDDGISNRNFMQLIHDDALSFKKKIQKAQIIGDEDKGNIKEVVKSLPGSPAIKKGILQSIKIVDELVKVMGGRKPESIVVEMARENQYTNQGKSNSQQRLKRLEKSLKELGSKILKENIPAKLSKIDNNALQNDRLYLYYLQNGKDMYTGDDLDIDRLSNYDIDHIIPQAFLKDNSIDNKVLVSSASNRGKSDDVPSLEVVKKRKTFWYQLLKSKLISQRKFDNLTKAERGGLSPEDKAGFIQRQLVETRQITKHVARLLDEKFNNKKDENNRAVRTVKIITLKSTLVSQFRKDFELYKVREINDFHHAHDAYLNAVVASALLKKYPKLEPEFVYGDYPKYNSFRERKSATEKVYFYSNIMNIFKKSISLADGRVIERPLIEVNEETGESVWNKESDLATVRRVLSYPQVNVVKKVEEQNHGLDRGKPKGLFNANLSSKPKPNSNENLVGAKEYLDPKKYGGYAGISNSFTVLVKGTIEKGAKKKITNVLEFQGISILDRINYRKDKLNFLLEKGYKDIELIIELPKYSLFELSDGSRRMLASILSTNNKRGEIHKGNQIFLSQKFVKLLYHAKRISNTINENHRKYVENHKKEFEELFYYILEFNENYVGAKKNGKLLNSAFQSWQNHSIDELCSSFIGPTGSERKGLFELTSRGSAADFEFLGVKIPRYRDYTPSSLLKDATLIHQSVTGLYETRIDLAKLGEG

SEQ ID NO: 47 - protein, 1138 aa, Acidothermus cellulolyticus
MGGSEVGTVPVTWRLGVDVGERSIGLAAVSYEEDKPKEILAAVSWIHDGGVGDERSGASRLALRGMARRARRLRRFRRARLRDLDMLLSELGWTPLPDKNVSPVDAWLARKRLAEEYVVDETERRRLLGYAVSHMARHRGWRNPWTTIKDLKNLPQPSDSWERTRESLEARYSVSLEPGTVGQWAGYLLQRAPGIRLNPTQQSAGRRAELSNATAFETRLRQEDVLWELRCIADVQGLPEDVVSNVIDAVFCQKRPSVPAERIGRDPLDPSQLRASRACLEFQEYRIVAAVANLRIRDGSGSRPLSLEERNAVIEALLAQTERSLTWSDIALEILKLPNESDLTSVPEEDGPSSLAYSQFAPFDETSARIAEFIAKNRRKIPTFAQWWQEQDRTSRSDLVAALADNSIAGEEEQELLVHLPDAELEALEGLALPSGRVAYSRLTLSGLTRVMRDDGVDVHNARKTCFGVDDNWRPPLPALHEATGHPVVDRNLAILRKFLSSATMRWGPPQSIVVELARGASESRERQAEEEAARRAHRKANDRIRAELRASGLSDPSPADLVRARLLELYDCHCMYCGAPISWENSELDHIVPRTDGGSNRHENLAITCGACNKEKGRRPFASWAETSNRVQLRDVIDRVQKLKYSGNMYWTRDEFSRYKKSVVARLKRRTSDPEVIQSIESTGYAAVALRDRLLSYGEKNGVAQVAVFRGGVTAEARRWLDISIERLFSRVAIFAQSTSTKRLDRRHHAVDAVVLTTLTPGVAKTLADARSRRVSAEFWRRPSDVNRHSTEEPQSPAYRQWKESCSGLGDLLISTAARDSIAVAAPLRLRPTGALHEETLRAFSEHTVGAAWKGAELRRIVEPEVYAAFLALTDPGGRFLKVSPSEDVLPADENRHIVLSDRVLGPRDRVKLFPDDRGSIRVRGGAAYIASFHHARVFRWGSSHSPSFALLRVSLADLAVAGLLRDGVDVFTAELPPWTPAWRYASIALVKAVESGDAKQVGWLVPGDELDFGPEGVTTAAGDLSMFLKYFPERHWVVTGFEDDKRINLKPAFLSAEQAEVLRTERSDRPDTLTEAGEILAQFFPRCWRATVAKVLCHPGLTVIRRTALGQPRWRRGHLPYSWRPWSADPWSGGTP

SEQ ID NO: 48 - protein, 1629 aa, Francisella novicida
MNFKILPIAIDLGVKNTGVFSAFYQKGTSLERLDNKNGKVYELSKDSYTLLMNNRTARRHQRRGIDRKQLVKRLFKLIWTEQLNLEWDKDTQQAISFLFNRRGFSFITDGYSPEYLNIVPEQVKAILMDIFDDYNGEDDLDSYLKLATEQESKISEIYNKLMQKILEFKLMKLCTDIKDDKVSTKTLKEITSYEFELLADYLANYSESLKTQKFSYTDKQGNLKELSYYHHDKYNIQEFLKRHATINDRILDTLLTDDLDIWNFNFEKFDFDKNEEKLQNQEDKDHIQAHLHHFVFAVNKIKSEMASGGRHRSQYFQEITNVLDENNHQEGYLKNFCENLHNKKYSNLSVKNLVNLIGNLSNLELKPLRKYFNDKIHAKADHWDEQKFTETYCHWILGEWRVGVKDQDKKDGAKYSYKDLCNELKQKVTKAGLVDFLLELDPCRTIPPYLDNNNRKPPKCQSLILNPKFLDNQYPNWQQYLQELKKLQSIQNYLDSFETDLKVLKSSKDQPYFVEYKSSNQQIASGQRDYKDLDARILQFIFDRVKASDELLLNEIYFQAKKLKQKASSELEKLESSKKLDEVIANSQLSQILKSQHTNGIFEQGTFLHLVCKYYKQRQRARDSRLYIMPEYRYDKKLHKYNNTGRFDDDNQLLTYCNHKPRQKRYQLLNDLAGVLQVSPNFLKDKIGSDDDLFISKWLVEHIRGFKKACEDSLKIQKDNRGLLNHKINIARNTKGKCEKEIFNLICKIEGSEDKKGNYKHGLAYELGVLLFGEPNEASKPEFDRKIKKFNSIYSFAQIQQIAFAERKGNANTCAVCSADNAHRMQQIKITEPVEDNKDKIILSAKAQRLPAIPTRIVDGAVKKMATILAKNIVDDNWQNIKQVLSAKHQLHIPIITESNAFEFEPALADVKGKSLKDRRKKALERISPENIFKDKNNRIKEFAKGISAYSGANLTDGDFDGAKEELDHIIPRSHKKYGTLNDEANLICVTRGDNKNKGNRIFCLRDLADNYKLKQFETTDDLEIEKKIADTIWDANKKDFKFGNYRSFINLTPQEQKAFRHALFLADENPIKQAVIRAINNRNRTFVNGTQRYFAEVLANNIYLRAKKENLNTDKISFDYFGIPTIGNGRGIAEIRQLYEKVDSDIQAYAKGDKPQASYSHLIDAMLAFCIAADEHRNDGSIGLEIDKNYSLYPLDKNTGEVFTKDIFSQIKITDNEFSDKKLVRKKAIEGFNTHRQMTRDGIYAENYLPILIHKELNEVRKGYTWKNSEEIKIFKGKKYDIQQLNNLVYCLKFVDKPISIDIQISTLEELRNILTTNNIAATAEYYYINLKTQKLHEYYIENYNTALGYKKYSKEMEFLRSLAYRSERVKIKSIDDVKQVLDKDSNFIIGKITLPFKKEWQRLYREWQNTTIKDDYEFLKSFFNVKSITKLHKKVRKDFSLPISTNEGKFLVKRKTWDNNFIYQILNDSDSRADGTKPFIPAFDISKNEIVEAIIDSFTSKNIFWLPKNIELQKVDNKNIFAIDTSKWFEVETPSDLRDIGIATIQYKIDNNSRPKVRVKLDYVIDDDSKINYFMNHSLLKSRYPDKVLEILKQSTIIEFESSGFNKTIKEMLGMKLAGIYNETSNN

SEQ ID NO: 49 - protein, 1068 aa, Verminephrobacter eiseniae
MNKAVAYRLALDLGSTSLGWAIFRLNEAREPTAIIRAGVRIFSDGRNANSEPLAVHRRVARAMRRRRDRLLKRKKRMHDQLVQHGFFPAEVAERKELERLNPYQLRAKGLHEALTPGEFARALFHINQRRGFKSNRKTDRKDNDSGALKQAISELRKRIQDSDCATAGEWFWKERMQQKPEGVRGQWVRARYRKTPSTTDEGKKRIGYDLYVDRAMVEQEFDALWAAQAALQPGLFTEAARAELKDTLLYQRDLRPVKPGRCTLLPAEERAPLALPSTQRFRILQEVNNLRLLDEALREVPLNLAQRDAVVSALEGKKELSFAAIRKLLTLSGKFNLEDEKRAELKGNATSVILARKDLFGDAWAGFDAAVQDEIVWRLVSQESEGALIAWLQQHTGVDGVCAEAIVNTRLPDGYGRLSRKALERIVPALQREVCTYDKAVQAAGFAHHSDLGFDFDYAEDEVQQVGEHTIASTGEVQAQYAFKQLPYYGKALQRHVAFGSGDAKDHEEKCYGKIANPTVHIGLNQVRTVVNALIRRYGHPTEVVVELARDLKQSREQKQQTQREQADNQKRNEDIRKRIAPILETSPERVRDRDIKKWILWEELNKKDIADRHCPYSGERISATMLLSEAVEIEHILPFSRTLDDSLNNRTVAMRRANRIKGDRTPWEARADFEAQGWRYEAILQRAEGMPPRKRYRFAEDGYQRWLGKDRNFLARALNDTSYLSRLAANYLRLVCPQGVRVIPGQMTDKLRGKFGLNSVLGLDGKKNRNDHRHHAVDACVIGVTDQGLMQRFANASKQARENGLTRLVQDMLLPWWPSYYDHVERAVRHIRVSHRPDHGFEGAMMKGTAHGIREDGIREDGRIKQRPKAKGSADHKTITLIPIDEPRQLARHGVDAEGKPLPYKGYASGSNYCIEITKNGKGKWEGQVISTFDAYRIKAAADAAARAGQVISTVEADSIVRKSGWERLRGAQSQNGQPLVMRLVIGDSVRMEVDGRDEVMRVVKMSGKEMVFAPVREANVDKRNNMPDEQDPFTYTYKRADQLRKAKARQVTISPIGELRDPGFKG

SEQ ID NO: 50 - protein, 1125 aa, Francisella tularensis
MNVKILPIAIDLDVKNTGVFSAFYQKGTSLEKLDNKNGKVYELSKDSYTLLMNNRTARRHQRRGIDRKQLVKRLFKLVWTEQLNLEWDKDTQQAISFLFNRRGFSFITDGYSTEYLNIVPEQVKAILMDIFDDYNGEDDLDSYLKLATEQESKISEIYNKLMQKILEFKLRKLCTDIKDDKVSTKTLKEITSYEFELLADYLANYSESLKIQKFSYTDKQGNLKELSYYHHDKYNIQEFLKRHATINDEILDTLLTDDFDIWNFNFEKFDFDKNEEKLQNQEDKDHTQAHLHHFVFAVNKIKSEMASGGRHRSQYFQEITNVLDENNHQEGYLKNFCENLHNKKYSNLSVKNLVNLVGNLSNLELKPLRKYFNDKIHAKADHWDEQKFTETYCHWILGEWRVGVKDQDKKDGAKYSYKDLCNELKQKVTKAGLIDFLLELDPCRTIPPYLDNNNRKPPKCQSLILNPKFLDNQYPNWQQYLQELKKLQSIQDYLDSFETDLKDLKSSKDQPYFVEYKSSNQQMASGQRDYKDLDARILQFIFDRVKASDELLLNEIYFQAKKLKQKASSELEKLESSKKLDEVIANSQLSQILKSQHTNGIFEQGTFLHLVCKYYKQRQRARDSRLYIMPEYRYDKKLDKYNNTGRFDDNNQLLTYCNHKPRQKRYQLLNDLAGVLQVSRNQLLSSVEEWFQQAQRVGEISKSQDEQIFEWLKSFKIASYCKAAVEMQKQYRGTLKNAIQTAIFRQSENINKNKNKNTGNQQQALSENSKDVKSLTADEKKLLKLIENIAKASQKIGESLGLNDKQIKKFNSIYSFAQIQQIAFAERKGNANTCAVCSADNAHRMQQIKITELVEDNKDNIILSAKAQRLPAIPTRIVDGAVKKMATILAKNIVDDNWQNIKQVLSAKHQLHIPIITESNAFEFEPALADVKGKSLKDRRKKALERISPENIFKDKNNRIKEFAKGISAYSGANLTDGDFDGAKEELDHIIPRSHKKYGTLNDEANLICVTRDDNKNIFAIDTSKWFEIETPSDLRDIGVATIQYKIDNNSRPKVRVKLDYVIDDDSKINYFMNHSLLKSRYPDKVLEILKQSTIIEFESSGFNKTIKEMLGMTLAGIYNETSNN

SEQ ID NO: 51 - protein, 1064 aa, Bradyrhizobium sp.
MKRTSLRAYRLGVDLGANSLGWFVVWLDDHGQPEGLGPGGVRIFPDGRNPQSKQSNAAGRRLARSARRRRDRYLQRRGKLMGLLVKHGLMPADEPARKRLECLDPYGLRAKALDEVLPLHHVGRALFHLNQRRGLFANRAIEQGDKDASAIKAAAGRLQTSMQACGARTLGEFLNRRHQLRATVRARSPVGGDVQARYEFYPTRAMVDAEFEAIWAAQAPHHPTMTAEAHDTIREAIFSQRAMKRPSIGKCSLDPATSQDDVDGFRCAWSHPLAQRFRIWQDVRNLAVVETGPTSSRLGKEDQDKVARALLQTDQLSFDEIRGLLGLPSDARFNLESDRRDHLKGDATGAILSARRHFGPAWHDRSLDRQIDIVALLESALDEAAIIASLGTTHSLDEAAAQRALSALLPDGYCRLGLRAIKRVLPLMEAGRTYAEAASAAGYDHALLPGGKLSPTGYLPYYGQWLQNDVVGSDDERDTNERRWGRLPNPTVHIGIGQLRRVVNELIRWHGPPAEITVELTRDLKLSPRRLAELEREQAENQRKNDKRTSLLRKLGLPASTHNLLKLRLWDEQGDVASECPYTGEAIGLERLVSDDVDIDHLIPFSISWDDSAANKVVCMRYANREKGNRTPFEAFGHRQGRPYDWADIAERAARLPRGKRWRFGPGARAQFEELGDFQARLLNETSWLARVAKQYLAAVTHPHRIHVLPGRLTALLRATWELNDLLPGSDDRAAKSRKDHRHHAIDALVAALTDQALLRRMANAHDDTRRKIEVLLPWPTFRIDLETRLKAMLVSHKPDHGLQARLHEDTAYGTVEHPETEDGANLVYRKTFVDISEKEIDRIRDRRLRDLVRAHVAGERQQGKTLKAAVLSFAQRRDIAGHPNGIRHVRLTKSIKPDYLVPIRDKAGRIYKSYNAGENAFVDILQAESGRWIARATTVFQANQANESHDAPAAQPIMRVFKGDMLRIDHAGAEKFVKIVRLSPSNNLLYLVEHHQAGVFQTRHDDPEDSFRWLFASFDKLREWNAELVRIDTLGQPWRRKRGLETGSEDATRIGWTRPKKWP

SEQ ID NO: 52 - protein, 1354 aa, Flavobacterium psychrophilum
MKKILGLDLGTNSIGWAFINEAENEIEVSSIVNTGVRIVPLTTDEESDFKKGNTISINADRTLKRGARRGLQRFKQRREALLETFNRIKFIATDFVYAETGAATTFSSYQLRAKSAVEAVTKEELVKVLLMLNKKRGYKSSRKAKTAEEGDAIDGMKIAKEIFENNLTPGQWVYNSLSKGGKFIPDFYHSDLQKELEKIVRFQNQFHSEQINDKLLADIQGKSRTQTSQHFSKTLNIPLAENKGTREETKLQHYQWRNEALANELDMKILAFIITEINNQINQSSGYLGAISDRSKELYFNQETVGQYQYKQLQENVHAKLKNQVFYRQDYLDEFEKIWETQAKFHSELNEKLKAEIRDITIFYQRKLKSQKHLVSFCEFEKGHKAIPKSSPLFQEFRIWQNLNNVVVKNETTKEVFELSEELKQLIAEELQFKESMTDVQMLTFCELKKGTHTVNFKKIEGNRTNTSIYKAFEKILEVEGYEIDFSKMKPLEIKETVAPIFETLNINTVILDFDPTIQGNDFDKQPYYQLWHLLYSAEDDDKLKETLKTKFGFKENHLPFILNINLQADYGSLSAKAIKKILPHLMDGHIYDKACLMVGYNHSSSLTTAQNNDRVLKDTLELLKKNSLRNPVVEKILNQMINVINAIMKDPAMGKPDEIRVELARELKANNEQRKKATSDINTATTEHERIRKLLHSEFNIPRVTRNDIIRYKLWLETGGISLYTGNPIKASDLFSKNYDIEHIIPKSRLFDDSFSNKTLCERQLNIDKSNKTAYSFLQEKLSENDFAAYENRVKDLFKTGKIKSYTKYKKLLMADNEIPEGFIDRQLRETQYIAKKAKEILLEVSRNVTATIGSVTDKLRQDWELVDVMKELNWEKYDKLGLTHIEEGKNGERLSKIKDWTKRNDHRHHAMDAITVAFTKPAYIQYLNNLNAKTQGENKANSIIGIENKHLYRDKNNKLRFISPMKNFREEAKKQLESILISYKAKNKVVTKNKNTTKKSGGTNQKIQLTPRGRLHKETVYGKLQQYATKEEKVNASFTEDYIQKVAKKEYREALLKRLEENDNDPKKAFTGKNALNKTPIYISLKDNIIVPEKVKTVWLETDYTIRKDITPDLKIDKVIDVGIKRILQNRLNEFNGDPKKAFVNLGESPIWLNKEKGIAIKRVTISGVSNAQALHTKKDHLGNEILDKNGNPIPVDFISTGNNHHVAIYRDEKGNLQEEVVSFYDAVIRRNLGLSVINKNHEKGWEFLFSMKQNEFFIFPSDGFNPHEIDLLNPNNYHLISPNIFRVQKISTKNYMFNHHLETKAVDGEMLKSKKELSKTSYHFIQTPTNLNGIIKVRINHLGKIVHLGEY

SEQ ID NO: 53 - protein, 1062 aa, Actinobacillus succinogenes
MNLNYILGLDLGIASVGWAVVEIDEQENPQRLIDVGVRTFDRAEVLKTGESLALARRLARSSRRLVKRRAERIKKAKRLLKAENLLLSADEILPNEAWQLRVKGLDQKLERQEWAAVLLHLLKHRGYLSQRKNESKSENKELGALLSGVAINHQILQSAEYRTPAEIAVNKFQAEEGHIRNQRGAYTHTFSRLDLLAEMELLFQRQATLGNPHTSTKLLENLTALLMWQKPALAGEAILKMLGKCTFEPTEYKAAKNSYSAERFVWLTKLNNLRILEQGAERALTDNERFALLDQPYEKAKLTYAQVRTLLGLSDEAIFKGLRYQGEDKKAVETKTTLMEVKAYHQIRKALEGLDLKAEWNELKNNPALLDEIGTAFSLYKTDDDIHRYLDGKLSESVLNALLENLNFDKFIQLSLKALQQILPLMLQGQRYDEAVSAIYGDHYGKKSDEIDRLLPNIPTDEIRNPVVLRTLTQARKVINAVVRLYGSPARIHIETGREVGKSYQDRKKLEKQQEENRKQRENAVKKFKEYFPNFVGEPKGKDILKMRLYELQQAKCLYSGKSLELYRLLEKGYVEVDHALPFSRTWDDSFNNKVLVLANENQNKGNATPYEWLDGKNNSEGWQHFVARVQTSGFSYAKKQRVLIQELDEKSFIERNLNDTRYVARFLCNHIADNMLLTGKGKRKVFASNGQITALLRGCWGLQKVRENNDRHHALDAVVVACSTKSMQDKITKFVKYKEGRLFKDKKDGVYKGERINRETGEIISLHFPTPWKFFKENVEIRIFSENPKLELENRLPDYPQYNHEFVQPLFVSRMPTRKMTGQGHMETVKSAKRLDKGLSVLKVPLTQLKLSDLERMVNREREMALYEALKECLEQFGNDPAKAFAEPFYKKGGALVKAVRVEQTQKSGVLVRNGNGVADNATGSIVRVDVFTKGGKYFLVPIYTWQVAKGILPNKAVIQGKDESEWEEMDENAVFQFSMHKNDLIKVKTKKGEIFGYFNGLDRATGSIEIEEHDLEKSKGKNGSHRGLGVKTAFFLEKYQVDELGKNIRPCRPTKRQHVR

SEQ ID NO: 54 - protein, 1340 aa, Dorea longicatena
MEQEYYLGLDMGTGSVGWAVTDSEYHVLRKHGKALWGVRLFESASTAEERRMFRTSRRRLDRRNWRIEILQEIFAEEISKKDPGFFLRMKESKYYPEDKRDINGNCPELPYALFVDDDFTDKDYHKKFPTIYHLRKMLMNTEETPDIRLVYLAIHHMMKHRGHFLLSGDINEIKEFGTTFSKLLENIKNEELDWNLELGKEEYAVVESILKDNMLNRSTKKTRLIKALKAKSICEKAVLNLLAGGTVKLSDIFGLEELNETERPKISFADNGYDDYIGEVENELGEQFYIIETAKAVYDWAVLVEILGKYTSISEAKVATYEKHKSDLQFLKKIVRKYLTKEEYKDIFVSTSDKLKNYSAYIGMTKINGKKVDLQSKRCSKEEFYDFIKKNVLKKLEGQPEYEYLKEELERETFLPKQVNRDNGVIPYQIHLYELKKILGNLRDKIDLIKENEDKLVQLFEFRIPYYVGPLNKIDDGKEGKFTWAVRKSNEKIYPWNFENVVDIEASAEKFIRRMTNKCTYLMGEDVLPKDSLLYSKYMVLNELNNVKLDGEKLSVELKQRLYTDVFCKYRKVTVKKIKNYLKCEGIISGNVEITGIDGDFKASLTAYHDFKEILTGTELAKKDKENIITNIVLFGDDKKLLKKRLNRLYPQITPNQLKKICALSYTGWGRFSKKFLEEITAPDPETGEVWNIITALWESNNNLMQLLSNEYRFMEEVETYNMGKQTKTLSYETVENMYVSPSVKRQIWQTLKIVKELEKVMKESPKRVFIEMAREKQESKRTESRKKQLIDLYKACKNEEKDWVKELGDQEEQKLRSDKLYLYYTQKGRCMYSGEVIELKDLWDNTKYDIDHIYPQSKTMDDSLNNRVLVKKKYNATKSDKYPLNENIRHERKGFWKSLLDGGFISKEKYERLIRNTELSPEELAGFIERQIVETRQSTKAVAEILKQVFPESEIVYVKAGTVSRFRKDFELLKVREVNDLHHAKDAYLNIVVGNSYYVKFTKNASWFIKENPGRTYNLKKMFTSGWNIERNGEVAWEVGKKGTIVTVKQIMNKNNILVTRQVHEAKGGLFDQQIMKKGKGQIAIKETDERLASIEKYGGYNKAAGAYFMLVESKDKKGKTIRTIEFIPLYLKNKIESDESIALNFLEKGRGLKEPKILLKKIKIDTLFDVDGFKMWLSGRTGDRLLFKCANQLILDEKIIVTMKKIVKFIQRRQENRELKLSDKDGIDNEVLMEIYNTFVDKLENTVYRIRLSEQAKTLIDKQKEFERLSLEDKSSTLFEILHIFQCQSSAANLKMIGGPGKAGILVMNNNISKCNKISIINQSPTGIFENEIDLLKI

SEQ ID NO: 55 - protein, 984 aa, Campylobacter jejuni
MAKILAFDIGISSIGWAFSENDELKDCGVRIFTKAENPKTGESLALPRRIARSARKRLARRKARLNHLKHLIANEFKLNYEDYQSFDEILAKAYKGSLISPYELRFRALNELLSKQDFARVILHIAKRRGYDDIKNNGDEEKGKILKAIKQNEEKLANYQSVGEYLYKEYFQKFKENSKEFINVRNKKESYERCIAQSFLKDELKLIFKKQREFGFSFSKKFEEEVLSVAFYKRALKDFSHLVGNCSFFTDEKRAPKNSPLAFMFVALTRIINLLNNLKNTLYTKDDLNALLNEVLKNGTLTYKQTKKLLGLSDDYEFKGEKGNYFIEFKKYKEFIKALGEHSLSQDDLNEIAKDITLIKDEIKLKKALAKYDLNENQIDNLSKLEFKDHLNISFKALKLITPLMLEGKKYDEACNELTLKVAINEDKKDFLPAFNETYYKDEVTNPVVLRAIKEYRKVLNALLKKYGKVHKINIELAREVGKNHSQRAKIEKEQNENYKAKKDAELECEKLGLKINSKNILKLRLFKEQKEFCVYSGEKIKLSDLQDEKMLEIDHIYPYSRSFDDSYMNKVLVFTKQNQEKLNQTPFEAFGNDSAKWQKIEVLAKNLPTKKQKRILDKNYKDKEQKDFKDRNLNDTRYIARLVLNYTKDYLDFLPLSDDENTKLNDTQKGSKVHVEAKSGMLTSALRHTWGFSTKDRNNHLHHAIDAVIIAYANNSIVKAFSDFKKEQESNTAELYAKKISELDYKNKRKFFEPFSGFRQKVLDKIDEIFVSKPERKKPSGALHEETFRKEEEFYQSYGGKEGVLKALELGKIRKVNGKIVKNGDMFRVDIFKHKKTNKFYAVPIYTMDFALKVLPNKAVARSKKGEIKDWILMDENYEFCFSLYKDSLILIQTKDMQEPEFVYYNAFTSSTVSLIVSKHDNKFETLSKNQKILFKNANEKEVIAKSIGIQNLKVFEKYIVSALGEVTKAEFRQREEFKNELR

SEQ ID NO: 56 - protein, 1037 aa, Parvibaculum lavamentivorans
MERIFGFDIGTTSIGFSVIDYSSTQSAGNIQRLGVRIFPEARDPDGTPLNQQRRQKRMMRRQLRRRRIRRKALNETLHEAGFLPAYGSADWPVVMADEPYELRRRGLEEGLSAYEFGRAIYHLAQHRHFKGRELEESDTPDPDVDDEKEAANERAATLKALKNEQTTLGAWLARRPPSDRKRGIHAHRNVVAEEFERLWEVQSKFHPALKSEEMRARISDTIFAQRPVFWRKNTLGECRFMPGEPLCPKGSWLSQQRRMLEKLNNLAIAGGNARPLDAEERDAILSKLQQQASMSWPGVRSALKALYKQRGEPGAEKSLKFNLELGGESKLLGNALEAKLADMFGPDWPAHPRKQEIRHAVHERLWAADYGETPDKKRVIILSEKDRKAHREAAANSFVADFGITGEQAAQLQALKLPTGWEPYSIPALNLFLAELEKGERFGALVNGPDWEGWRRTNFPHRNQPTGEILDKLPSPASKEERERISQLRNPTVVRTQNELRKVVNNLIGLYGKPDRIRIEVGRDVGKSKREREEIQSGIRRNEKQRKKATEDLIKNGIANPSRDDVEKWILWKEGQERCPYTGDQIGFNALFREGRYEVEHIWPRSRSFDNSPRNKTLCRKDVNIEKGNRMPFEAFGHDEDRWSAIQIRLQGMVSAKGGTGMSPGKVKRFLAKTMPEDFAARQLNDTRYAAKQILAQLKRLWPDMGPEAPVKVEAVTGQVTAQLRKLWTLNNILADDGEKTRADHRHHAIDALTVACTHPGMTNKLSRYWQLRDDPRAEKPALTPPWDTIRADAEKAVSEIVVSHRVRKKVSGPLHKETTYGDTGTDIKTKSGTYRQFVTRKKIESLSKGELDEIRDPRIKEIVAAHVAGRGGDPKKAFPPYPCVSPGGPEIRKVRLTSKQQLNLMAQTGNGYADLGSNHHIAIYRLPDGKADFEIVSLFDASRRLAQRNPIVQRTRADGASFVMSLAAGEAIMIPEGSKKGIWIVQGVWASGQVVLERDTDADHSTTTRPMPNPILKDDAKKVSIDPIGRVRPSND

SEQ ID NO: 57 - protein, 1107 aa, Eubacterium ventriosum
MGYTVGLDIGVASVGVAVLDENDNIVEAVSNIFDEADTSNNKVRRTLREGRRTKRRQKTRIEDFKQLWETSGYIIPHKLHLNIIELRNKGLTELLSLDELYCVLLSMLKHRGISYLEDADDGEKGNAYKKGLAFNEKQLKEKMPCEIQLERMKKYGKYHGEFIIEINDEKEYQSNVFTTKAYKKELEKIFETQRCNGNKINTKFIKKYMEIYERKREYYIGPGNEKSRTDYGIYTTRTDEEGNFIDEKNIFGKLIGKCSVYPEEYRASSASYTAQEFNLLNDLNNLKINNEKLTEFQKKEIVEIIKDASSVNMRKIIKKVIDEDIEQYSGARIDKKGKEIYHTFEIYRKLKKELKTINVDIDSFTREELDKTMDILTLNTERESIVKAFDEQKFVYEENLIKKLIEFRKNNQRLFSGWHSFSYKAMLQLIPVMYKEPKEQMQLLTEMNVFKSKKEKYVNYKYIPENEVVKEIYNPVVVKSIRTTVKILNALIKKYGYPESVVIEMPRDKNSDDEKEKIDMNQKKNQEEYEKILNKIYDEKGIEITNKDYKKQKKLVLKLKLWNEQEGLCLYSGKKIAIEDLLNHPEFFEIDHIIPKSISLDDSRSNKVLVYKTENSIKENDTPYHYLTRINGKWGFDEYKANVLELRRRGKIDDKKVNNLLCMEDITKIDVVKGFINRNLNDTRYASRVVLNEMQSFFESRKYCNTKVKVIRGSLTYQMRQDLHLKKNREESYSHHAVDAMLIAFSQKGYEAYRKIQKDCYDFETGEILDKEKWNKYIDDDEFDDILYKERMNEIRKKIIEAEEKVKYNYKIDKKCNRGLCNQTIYGTREKDGKIHKISSYNIYDDKECNSLKKMINSGKGSDLLMYNNDPKTYRDMLKILETYSSEKNPFVAYNKETGDYFRKYSKNHNGPKVEKVKYYSGQINSCIDISHKYGHAKNSKKVVLVSLNPYRTDVYYDNDTGKYYLVGVKYNHIKCVGNKYVIDSETYNELLRKEGVLNSDENLEDLNSKNITYKFSLYKNDIIQYEKGGEYYTERFLSRIKEQKNLIETKPINKPNFQRKNKKGEWENTRNQIALAKTKYVGKLVTDVLGNCYIVNMEKFSLVVDK

SEQ ID NO: 58 - protein, 1136 aa, Streptococcus gordonii
MNGLVLGLDIGIASVGVGILEKDTGKIIHASSRLFPAATADNNVERRSNRQGRRLNRRKKHRSVRLQDLFEGYGLLTDFSKVSMNLNPYQLRVQGMENQLTNEELFVALKNIVKRRGISYLDDASEDGGTVSSDYGKAVEENRKLLAEKTPGQIQLERFEKYGQLRGDFTVEENGEKHRLINVFSTSAYRKEAERILRKQQEFNSKITDEFIEDYLIILTGKRKYYHGPGNEKSRTDYGRFRTDGTTLDNIFGILIGKCTFYTEEYRASKASYTAQEFNLLNDLNNLTVPTETKKLSEEQKKLIIEYAKSAKTLGASTLLKYIAKMIDASVDQIRGYRVDVNNKPEMHTFEVYRKMQSLETIKVEELPRKVLDELAHILTLNTEREGIEEAINSKLKDIFNRDQVLELVQFRKNNSSLFSKGWHNFSIKLMMELIPELYETSEEQMTILTRLGKQRSKETSKRTKYIDEKELTEEIYNPVVAKSVRQAIKIINEATKKYGIFDNIVIEMARENNEEDAKKDYIKRQKANQDEKNAAMEKAAFQYNGKKELPDNIFHGHKELTTKIRLWHQQGEKCLYTGKNIPISDLIHNQYKYEIDHILPLSLSFDDSLSNKVLVLATANQEKGQRTPFQALDSMDDAWSYREFKSYVKDSKLLSNKKKDYLLTEEDISKIEVKQKFIERNLVDTRYSSRVVLNALQDFYKSHQLDTTISVVRGQFTSQLRRKWGIEKSRETYHHHAVDALIIAASSQLRLWKKHSNPLIAYKEGQFVDSETGEIVSLSDEEYKELVFKAPYDHFVDTLRSKKFEDSILFSYQVDSKYNRKISDATIYATRKAKLDKEKKEYTYTLGKIKDIYALGTKTPSKTGFYKFLDLYKTDKSQFLMYQKDRKTWDEVIEKIIEQYRPFKEYDKNGKEVDFNPFEKYRIGNGPIRKYSKKGNGPEIKSLKYYDILLGKHKNITPDGSRNTVALLSLNPWRTDVYYNSETKKYEFLGLKYADLCFEEGGAYGISEVKYKKIREKEGIGKNSEFKFTLYKNDLILIKDTETNCQQFFRFWSRTGKDNPKSFEKHKIELKPYEKAKFEKGEELKVLGKVPPSSNQFQKNMQIENLSIYKVKTDILGNKHFIKKEGDEPKLKFKK

SEQ ID NO: 59 - protein, 984 aa, Campylobacter jejuni
MARILAFDIGISSIGWAFSENDELKDCGVRIFTKAENPKTGESLALPRRLARSARKRLARRKARLNHLKHLIANEFKLNYEDYQSFDESLAKAYKGSLISPYELRFRALNELLSKQDFARVILHIAKRRGYDDIKNNGDEEKSEILKAIKQNEEKLVNYQSVGEYLYKEYFQKFKENSKEFINVRNKKESYERCITQSFLKDELKLIFQKQREFGFSFSKKFEEEVLSVAFYKRALKDFSHLVGNCSFFTDEKRAPKNSPLAFMFVALTRIINILNNLKNTEGILYTKDDLNALLNEVLKNGTLTYKQTKKLLGLSDDYEFKGEKGTYFIEFKKYKEFIKALGEHNLSQDDLNEIAKDITLIKDEIKLKKALAKYDLNQNQIDSLSKLEFKDHLNISFKALKLITPLMLEGKKYDEACNELNLKVAINEDKKDFLPAFNETYYKDEVTNPVVLRAIKEYRKILNALLKKYGKVHKINIELAREVGKNHSQRAKIEKEQNENYKAKKDAEIECEKLGLKINSKNILKLRLFKEQKEFCAYSGEKIKLSDLQDEKMLEIDHIYPYSRSFDDSYMNKVLVFTKQNQEKLNKTPFEAFGNDSTKWQKIEVLAKNLPEKKQKRILDKNYKDKEQKDFKDRNLNDTRYIARLVLNYTKDYLDFLPLSDDENTKLNDTQKGSKVHVEAKSGMLTSALRHTWGFSAKDRNNHLHHAIDAAIIAYANNSIVKAFSDFKKEQESNSVELYAKKISELDYKNKRKFFEPFSGFRQKVLDKIDEIFVSKPERKKPSGALHEETFRKEEEFYQSYGGKEGVLKALELGKIRKVNGKIVKNGDMFRVDIFKHKKTNKFYAVPIYTMDFALKVLPNKAVARSKKGEIKDWILMDENYEFCFSLYKDSLILIQTKDMQEPELVYFNAFTSSTVSLIVSKHDNKFETLSKNQKILFKNANEKEVIAKSIGIQNLKVFEKYIVSALGEVTKAEFRQREDFKK

SEQ ID NO: 60 - protein, 1079 aa, Dinoroseobacter shibae
MRLGLDIGTSSIGWWLYETDGAGSDARITGVVDGGVRIFSDGRDPKSGASLAVDRRAARAMRRRRDRYLRRRATLMKVLAETGLMPADPAEAKALEALDPFALRAAGLDEPLPLPHLGRALFHLNQRRGFKSNRKTDRGDNESGKIKDATARLDMEMMANGARTYGEFLHKRRQKATDPRHVPSVRTRLSIANRGGPDGKEEAGYDFYPDRRHLEEEFHKLWAAQGAHHPELTETLRDLLFEKIFFQRPLKEPEVGLCLFSGHHGVPPKDPRLPKAHPLTQRRVLYETVNQLRVTADGREARPLTREERDQVIHALDNKKPTKSLSSMVLKLPALAKVLKLRDGERFTLETGVRDAIACDPLRASPAHPDRFGPRWSILDADAQWEVISRIRRVQSDAEHAALVDWLTEAHGLDRAHAEATAHAPLPDGYGRLGLTATTRILYQLTADVVTYADAVKACGWHHSDGRTGECFDRLPYYGEVLERHVIPGSYHPDDDDITRFGRITNPTVHIGLNQLRRLVNRIIETHGKPHQIVVELARDLKKSEEQKRADIKRIRDTTEAAKKRSEKLEELEIEDNGRNRMLLRLWEDLNPDDAMRRFCPYTGTRISAAMIFDGSCDVDHILPYSRTLDDSFPNRTLCLREANRQKRNQTPWQAWGDTPHWHAIAANLKNLPENKRWRFAPDAMTRFEGENGFLDRALKDTQYLARISRSYLDTLFTKGGHVWVVPGRFTEMLRRHWGLNSLLSDAGRGAVKAKNRTDHRHHAIDAAVIAATDPGLLNRISRAAGQGEAAGQSAELIARDTPPPWEGFRDDLRVRLDRIIVSHRADHGRIDHAARKQGRDSTAGQLHQETAYSIVDDIHVASRTDLLSLKPAQLLDEPGRSGQVRDPQLRKALRVATGGKTGKDFENALRYFASKPGPYQAIRRVRIIKPLQAQARVPVPAQDPIKAYQGGSNHLFEIWRLPDGEIEAQVITSFEAHTLEGEKRPHPAAKRLLRVHKGDMVALERDGRRVVGHVQKMDIANGLFIVPHNEANADTRNNDKSDPFKWIQIGARPAIASGIRRVSVDEIGRLRDGGTRPI

SEQ ID NO: 61 - protein, 1096 aa, Eubacterium dolichum
MMEVFMGRLVLGLDIGITSVGFGIIDLDESEIVDYGVRLFKEGTAAENETRRTKRGGRRLKRRRVTRREDMLHLLKQAGIISTSFHPLNNPYDVRVKGLNERLNGEELATALLHLCKHRGSSVETIEDDEAKAKEAGETKKVLSMNDQLLKSGKYVCEIQKERLRTNGHIRGHENNFKTRAYVDEAFQILSHQDLSNELKSAIITIISRKRMYYDGPGGPLSPTPYGRYTYFGQKEPIDLIEKMRGKCSLFPNEPRAPKLAYSAELFNLLNDLNNLSIEGEKLTSEQKAMILKIVHEKGKITPKQLAKEVGVSLEQIRGFRIDTKGSPLLSELTGYKMIREVLEKSNDEHLEDHVFYDEIAEILTKTKDIEGRKKQISELSSDLNEESVHQLAGLTKFTAYHSLSFKALRLINEEMLKTELNQMQSITLFGLKQNNELSVKGMKNIQADDTAILSPVAKRAQRETFKVVNRLREIYGEFDSIVVEMAREKNSEEQRKAIRERQKFFEMRNKQVADIIGDDRKINAKLREKLVLYQEQDGKTAYSLEPIDLKLLIDDPNAYEVDHIIPISISLDDSITNKVLVTHRENQEKGNLTPISAFVKGRFTKGSLAQYKAYCLKLKEKNIKTNKGYRKKVEQYLLNENDIYKYDIQKEFINRNLVDTSYASRVVLNTLTTYFKQNEIPTKVFTVKGSLTNAFRRKINLKKDRDEDYGHHAIDALIIASMPKMRLLSTIFSRYKIEDIYDESTGEVFSSGDDSMYYDDRYFAFIASLKAIKVRKFSHKIDTKPNRSVADETIYSTRVIDGKEKVVKKYKDIYDPKFTALAEDILNNAYQEKYLMALHDPQTFDQIVKVVNYYFEEMSKSEKYFTKDKKGRIKISGMNPLSLYRDEHGMLKKYSKKGDGPAITQMKYFDGVLGNHIDISAHYQVRDKKVVLQQISPYRTDFYYSKENGYKFVTIRYKDVRWSEKKKKYVIDQQDYAMKKAEKKIDDTYEFQFSMHRDELIGITKAEGEALIYPDETWHNFNFFFHAGETPEILKFTATNNDKSNKIEVKPIHCYCKMRLMPTISKKIVRIDKYATDVVGNLYKVKKNTLKFEFD

SEQ ID NO: 62 - protein, 1082 aa, Neisseria meningitidis
MAAFKPNPINYILGLDIGIASVGWAMVEIDEDENPICLIDLGVRVFERAEVPKTGDSLAMARRLARSVRRLTRRRAHRLLRARRLLKREGVLQAADFDENGLIKSLPNTPWQLRAAALDRKLTPLEWSAVLLHLIKHRGYLSQRKNEGETADKELGALLKGVADNAHALQTGDFRTPAELALNKFEKESGHIRNQRGDYSHTFSRKDLQAELNLLFEKQKEFGNPHISDGLKEGIETLLMTQRPALSGDAVQKMLGHCTFEPAEPKAAKNTYTAERFIWLTKLNNLRILEQGSERPLTDTERTTLIDEPYRKSKLTYAQARKLLELDNTAFFKGLRYGKDNAEASTLMEMKAYHAISRALEKEGLKDKKSPLNLSPELQDEIGTAFSLFKTDEDITGRLKDRVQPEILEALLKHISFDKFVQISLKALRRIVPLMEQGKRYDEACAEIYGDHYGKKNTEEKIDLPPIPADEIRNPVVLRALSQARKVINGVVRRYGSPARIHIETAREVGKSFKDRKEIEKRQEENRKDREKAATKFREYFPNFVGEPKSKDILKLRLYEQQHGKCLYSGKEINLGRLNEKGYVEIDHALPFSRTWDDSFNNKVLVLGSENQNKGNQTPYEYFNGKDNSREWQEFKARVETSRFPRSKKQRILLQKFDEEGFKERNLNDTRYVNRFLCQFVADHMLLTGKGKRRVFASNGQITNLLRGFWGLRKVRAENDRHHALDAVVVACSTVAMQQKITRFVRYKEMNAFDGKTIDKETGEVLHQKTHFPQPWEFFAQEVMIRVFGKPDGKPEFEEADTPEKLRTLLAEKLSSRPEAVHEYVTPLFVSRAPNRKMSGQGHMETVKSAKRLDEGVSVLRVPLTQLKLKDLEKMVNREREPKLYEALKARLEAHKDDPAKAFAEPFYKYDKAGNRTQQVKAVRVEQVQKTGVWVRNHNGIADNATMVRVDVFEKGDKYYLVPIYSWQVAKGILPDRAVVQGKDEEDWQLIDDSFNFKFSLHPNDLVEVITKKARMFGYFASCHRGTGNINIRIHDLDHKIGKNGILEGIGVKTALSFQKYQIDELGKEIRPCRLKKRPPVR

SEQ ID NO: 63 - protein, 1050 aa, Gluconacetobacter diazotrophicus
MGENMIDESLTFGIDLGIGSCGWAVLRRPSAFGRKGVIEGMGSWCFDVPETSKERTPTNQIRRSNRLLRRVIRRRRNRMAAIRRLLHAAGLLPSTDSDALKRPGHDPWELRARGLDKPLKPVEFAVVLGHIAKRRGFKSAAKRKATNISSDDKKMLTALEATRERLGRYRTVGEMFARDPDFASRRRNREGKYDRTTARDDLEHEVHALFAAQRRLGQGFASPELEEAFTASAFHQRPMQDSERLVGFCPFERTEKRAAKLTPSFERFRLLARLLNLRITTPDGERPLTVDEIALVTRDLGKTAKLSIKRVRTLIGLEDNQRFTTIRPEDEDRDIVARTGGAMTGTATLRKALGEALWTDMQERPEQLDAIVQVLSFFEANETITEKLREIGLTLAVLDVLLTALDAGVFAKFKGAAHISTKAARNLLPHLEQGRRYDEACTMAGYDHAASRLSHHGQIVAKTQFNALVTEIGESIANPIARKALIEGLKQIWAMRNHWGLPGSIHVELARDVGNSIEKRREIEKHIEKNTALRARERREVHDLLDLEDVNGDTLLRYRLWKEQGGKCLYTGKAIHIRQIAATDNSVQVDHILPWSRFGDDSFNNKTLCLASANQQKKRSTPYEWLSGQTGDAWNAFVQRIETNKELRGFKKRNYLLKNAKEAEEKFRSRNLNDTRYAARLFAEAVKLLYAFGERQEKGGNRRVFTRPGALTAALRQAWGVESLKKQDGKRINDDRHHALDALTVAAVDEAEIQRLTKSFHEWEQQGLGRPLRRVEPPWESFRADVEATYPEVFVARPERRRARGEGHAATIRQVKERECTPIVFERKAVSSLKEADLERIKDGERNEAIVEAIRSWIATGRPADAPPRSPRGDIITKIRLATTIKAAVPVRGGTAGRGEMVRADVFSKPNRRGKDEWYLVPVYPHQIMNRKAWPKPPMRSIVANKDEDEWTEVGPEHQFRFSLYPRSNIEIIRPSGEVIEGYFVGLHRNTGALTISAHNDPKSIHSGIGTKTLLAISKYQVDRFGRKSPVRKEVRTWHGEACISPTPPG

SEQ ID NO: 64 - protein, 1391 aa, Kordia algicida
MKKILGLDLGTNSIGWALVNEAEHEHEQSSIVKLGVRVNPLSVDEKTNFEKGRPLSINADRTSKRSARRNLQRFKLRRKNLINLLLKHHIISNETILTEVGKNTTHQTLKLRSKATQEKISLEEFARILLSINKKRGYKSSRKEKNEDEGFTIDGMAIAKELYDNQLTPGQYVYNILQDGKNYIPDFYRSDLQAEFDDVWQFQKKFYSSILTDEFYLKLKGQGKENTRKLFLAIHQVYTAENKGKRDAVKLQYYKWRSEAVKKQLSIEEVAYVLVEINNNINKSSGYLGAISDRSKALYFNNETVGEYLYGQLVKNRHNSLRNQVFYRQDYLDEFEKIWETQAKFYDELTNELKQEIRDVVIFYQRKLKSQKHLISDCLFEKHHKAIPKSSPLFQEFKIWQNLNYLEFVHTQSKEKIFFSELDDETRQFVFAELNIRGTLKIKEIKKLIGLETPVYWKSNFDEIEGNRTNQVLYNVYQNIADDLGYGFDWSKKHAFEINAELQAIFKDVGIDTAILNFDASIEENDFDKQKSYQLWHLLYSAEDTDKATEEDKLIYGNINTKLKKQLHQKYGFEAKYGNLLANISLQQDYGNLSAKAIKKILPYLESGNSFYEACTIVGYNPSNSLTKEQQQNRKLKDKLELLPKNSLRNPVVEKILNQKVNLINQLIDEYGKPDEVRIELARELKKSAKQRADLSKHINDATLKNQNIRKTLQKDFGIQNPSKNDVIRYKLYDELKDNGYKTLFTNKYIPKEQLFSKDVDIEHIIPKAILFDDSFSNKTLAYRNVNLAKADATAFDFISSKHLDDLDNYKARVETLFQSKRISKGKYKKLLMTRQNLPEDFIERDLRNSQYIAKKATAMLKEVFRSVVPTSGRITDKLREDWDLVNVMKELNLPKYRTLGLTEFIERKNGNKIEQIIDWTKRNDHRHHAMDALTVAFTTHNHIQYLNNLNVTHGLNGVDTDHEKSRLYAIKQAITKVYIVGKTKKRKFIPPMENFRSHAKNHLEGILISFKNKNKVVTKNKNRTKTKTKGVFNEKIQLTPRGQLHKETIYGHAKKVIVTKEKVSSKFTHEKILQVTKPAYREALLKRLASFKNDPKKAFSGKNALSKNPLYFDITSGKKVPDTVKLSYFENSYVIRKEVNSDNFKNEKSLQKVLDVGIRRILEKRLADYNGNAKEAFSNLEKNPIWKDKEKGVCIKKVRIEALKNAEPLHVKKDHLGKIILDDENKSTPVDFISTGNNHHVAIYEDKDGKLHDKVVSFYEVVSRVNLGLPIIDKSFNSHLDWKFLFSMKQNEMFVFPSEDFNPKEIDIGNPKNNELISKYLFRVQKFSKVTYGNSAVRDYVFRHHLETELIDKKELKGITYYQLKSIGMLEKLVKVRINHIGKIVHIGEY

SEQ ID NO: 65 - protein, 1116 aa, Clostridium spiroforme
MVEFLLKEMKIMGRLVLGLDIGITSVGYGVIDIDKNEFVDYGVRLFKEGTAINNEERRSKRGARRLKRRKTNRIADMKKLLERNGLIDEQYTALNNPYEIRKKGLKNKLSNYELATAILHITKNRGTCLESNADETQDEESTKNILSKNALELKDKYICEIQLARLEESGKIRGINNNFKTEDYLKELSKILENQDLEKETIDKIKEIVARRRRYDQGPGSEKSPTPYGSYRMENGELVHVNLIDMMRGKCSVFPDQLRAPQQSYSAELFNLLNDLNNLKINGEKLSSTEKQKIIDFVNEKGGITVKQLLKLIDVGITEISGFRIDKNEKPLITEFKGYKKVLKVFKNYNQESLLNDKSIVDTIMDINTKIKSIDERSDQLKQVLPSLDTSIINDLASIKGVSGYHSLSLKALNLINNEMLKTEMNQMQVLHQLDIFDKNRVSLKGQRQIYADDNAILSPVAKRAHRETFKVINKLRSIYGEFDSIVIETTRDKNTQDQKKRIKNNQKNYEERNTEVNNFLKEAGYNPENINAKTKMKIRLYIEQDAKSAYTLQDINLKELIEDEKAYEIDHIIPISISLDDSFNNKVLTTHDENQEKGNLTPISAFLKGKFHNGNLNTYKVFIQNNKNLNRKKKEYLLCEDDITRYEVVQNFINRNLVDTSYACRTVMNTLVHYFKDNEINTKVHTIKGQATSTFRKRIGLIKDREEDYFHHAIDALIVASLKKMNLINSYLMKVDFNEMYDEETGEIFNVLPDNSYLDEKYISFVSNLKNIYEESNKYIRGVMIKEKMTYPLIKVSHKIDTKPNRKISDDTIYSTRNVDNQDMLVERIKNIYDPKENAANTLINDIINDNTDKYIMYHKDPQTFDKIKAIVLNHFNEFKTDKNCYIVTKEGLYKLKGTSPLALYYEEFGPITKYAKKNNGPTIHSMKFYSEKLGNHLSITHKYSTVNKKVITKQISPYRTDFYQSPEGKYKFVTVRYKDVAYNAKKDKYIIDHSWYREQKKLKKIADEWIFVCSVHRDELIGIMKADGQKRIFDSSTESDGETLYHDAKTYEILKFTATNNDITGRFEVKPIYCYCKKQLMVSIGTCRKIQKFATDVLGNLYIVKDNVLKLEFK

SEQ ID NO: 66 - protein, 1348 aa, Finegoldia magna
MKSEKKYYIGLDVGTNSVGWAVTDEFYNILRAKGKDLWGVRLFEKADTAANTRIFRSGRRRNDRKGMRLQILREIFEDEIKKVDKDFYDRLDESKFWAEDKKVSGKYSLFNDKNFSDKQYFEKFPTIFHLRKYLMEEHGKVDIRYYFLAINQMMKRRGHFLIDGQISHVTDDKPLKEQLILLINDLLKIELEEELMDSIFEILADVNEKRTDKKNNLKELIKGQDFNKQEGNILNSIFESIVTGKAKIKNIISDEDILEKIKEDNKEDFVLTGDSYEENLQYFEEVLQENITLFNTLKSTYDFLILQSILKGKSTLSDAQVERYDEHKKDLEILKKVIKKYDEDGKLFKQVFKEDNGNGYVSYIGYYLNKNKKITAKKKISNIEFTKYVKGILEKQCDCEDEDVKYLLGKIEQENFLLKQISSINSVIPHQIHLFELDKILENLAKNYPSFNNKKEEFTKIEKIRKTFTFRIPYYVGPLNDYHKNNGGNAWIFRNKGEKIRPWNFEKIVDLHKSEEEFIKRMLNQCTYLPEETVLPKSSILYSEYMVLNELNNLRINGKPLDTDVKLKLIEELFKKKTKVTLKSIRDYMVRNNFADKEDFDNSEKNLEIASNMKSYIDFNNILEDKFDVEMVEDLIEKITIHTGNKKLLKKYIEETYPDLSSSQIQKIINLKYKDWGRLSRKLLDGIKGTKKETEKTDTVINFLRNSSDNLMQIIGSQNYSFNEYIDKLRKKYIPQEISYEVVENLYVSPSVKKMIWQVIRVTEEITKVMGYDPDKIFIEMAKSEEEKKTTISRKNKLLDLYKAIKKDERDSQYEKLLTGLNKLDDSDLRSRKLYLYYTQMGRDMYTGEKIDLDKLFDSTHYDKDHIIPQSMKKDDSIINNLVLVNKNANQTTKGNIYPVPSSIRNNPKIYNYWKYLMEKEFISKEKYNRLIRNTPLTNEELGGFINRQLVETRQSTKAIKELFEKFYQKSKIIPVKASLASDLRKDMNTLKSREVNDLHHAHDAFLNIVAGDVWNREFTSNPINYVKENREGDKVKYSLSKDFTRPRKSKGKVIWTPEKGRKLIVDTLNKPSVLISNESHVKKGELFNATIAGKKDYKKGKIYLPLKKDDRLQDVSKYGGYKAINGAFFFLVEHTKSKKRIRSIELFPLHLLSKFYEDKNTVLDYAINVLQLQDPKIIIDKINYRTEIIIDNFSYLISTKSNDGSITVKPNEQMYWRVDEISNLKKIENKYKKDAILTEEDRKIMESYIDKIYQQFKAGKYKNRRTTDTIIEKYEIIDLDTLDNKQLYQLLVAFISLSYKTSNNAVDFTVIGLGTECGKPRITNLPDNTYLVYKSITGIYEKRIRIK

SEQ ID NO: 67 - protein, 1129 aa, Streptococcus infantarius
MSNGKILGLDIGVASVGVGIIDSKTGNVIHANSRLFSAANAENNAERRGFRGARRLTRRKKHRVKRVRDLFEKYDISTDFRNLNLNPYELRVKGLTEQLTNEELFAALRTIAKRRGISYLDDAEDDSTGSSDYAKSIDENRRLLKTKTPGQIQLERLEKYGQLRGNFTVYDENGEAHRLINVFSTSDYKNEARKILETQSNYNKQITDEFIEDYIEILTQKRKYYHGPGNEKSRTDYGRFRTDGTTLENIFGILIGKCSFYPEEYRASKASYTAQEFNFLNDLNNLKVPTETGKLSTEQKEYLVDFAKKSKALGASKLLKEIAKIVDCSVDDIKGYRVDNKDKPDLHTFEPYRKLKFNLSSIDIDELSRETLDKLADILTLNTEREGIEDAIKRNLPSQFTEEQISEIVQIRKNQSSAFNKGWHSFSAKLMNELIPELYVTSEEQMTILTRLEKFKVNKKSSKNTKTIDEKEITDEIYNPVVAKSVRQTIKIINAAVKKYGDFDKIVIEMPRDKNAEDEKKFIDKKQKENKKEKDDSLKRAAFLYNGTDNLPDGVFHGNKELKTKIRLWYQQGERCLYSGKLISIHDLVHNSNKFEIDHILPLSLSFDDSLANKVLVYAWTNQEKGQKTPYQVIDSMDTAWSFREMKDYVLKQKGLGKKKCEYLLTTENIDKIEVKKKFIERNLVDTRYASRVVLNSLQTALKELGKDTKVSVVRGQFTSQLRRKWNIDKSRETYHHHAVDALIIAASSQLKLWQKQENPMFESYGENQVVNKETGEILSISDDKYKELVFQPPYQGFVNTISSKGFEDEILFSYQVDSKFNRKVSDATIYSTRKAKLGKDKKDETYVLGKIKDIYSQDGFDTFIKRYKKDKTQFLMYQKDPLTWENVIEVILRDYPSEKLSEDGKKTVKCNPFEEYRRENGLICKYSKKGNGTPIKSLKYYDKKLGNCIDITPEKSKNRVVLRQISPWRADIYFNLETLKYELMGLKYSDLSFEKGTGKYHISQEKYDAIREKEGIGKKSEFKFTLYRNDLILIKDTLNNCERMLRFGSKNDTSKHYVELKPLEKGTFDSEEEILPVLGKVAKSGQFIKGLNKPNISIYKVRTDVLGNKFFIKKEGDKPKLDFKNNNK

SEQ ID NO: 68 - protein, 1065 aa, Clostridium perfringens
MNKDINYALGLDIGITSVGWAVINLDLNRIEDLGVRIFNAAENLKDGSSLALPRRLARGRRRLLRRKAYRVERVRKLILKNNILTKEELEGLFKNKEVIDVWEARVKGLDYKLSREEWAKILINFCKRRGFKSNRKNEAKDKEAGQILSSISYNIEKMKETNSRTIGEYIYNEVKNSEDSYAPLRNKFGEYKMCVSRDVIREEIHTLFEKQRELGNNFASDEIEDKYFEIFNSQRPFSNFEDLEKLVGFCTFERKKHKRAPKHCISSEEFTLYEGINKLSIIKDGEKRKLSEEERTLVVNEAFNKKEIKYTTLRKLLGLSEEELFSTLTYSIDKDISKTENTKFVSLKGYHEIKRAIEKGVSKKAWQDIENNRNLLNDIAYVLTLGKTDDEIEKQLRLRNVPEELFESLLDMSFNKFNNLSIYALEKILPFMKEGYQYNEACEKAGYNFKAIYEGVRTKKLPVIEIDEIVNPVVNRALAQTRKVINSVIDKYGSPVRINIELARDLAKNFKDRKLIEKEQKENRANLDKIRENLRELMDKEPTVVEVLKYRLWEQQRGECAYTQSQIPLERLFSPGYCEIDHIIPFSRSFDDSLSNKILVLGSENQRKGNRTPYEYFGEDSERWNSFEIWVKGSYLNYKKKANLLKKKFSEEEQRDWKARNLQDTKYICRYISNFVNNRLEFKESENKQKVITVNGRATAYLRSRWGLNKVREDGDKHHALDAAVVGVTTQGMVQKISKYSKAHELYTVRKNDEFVDVETGECVDVDEYKEIRKDILPRPWRGFSEELKLRLSDNPLEELKKSPIETYNEEFIKENVKPIFVSRVPFRKISGKLFKETIYSERAFKDGYFVSKKSLVDLKRGDLDNFYNYECDKKLYDAISERMKEFNYNGKKAFESPFRKPTKSGKEGPVVRSVKIKSAVPFKDGIPMNEGLVAKEGMVRIDIYEKEGKYFVVPVYRYQLAKGIVPKRAAIAKKDELKWPIMDQTYNFKFSIYKNDLIEVKYDKKGVYFGYYDGFDRNSASLTIEKHDNSERYRSIGLKVGVLEINKYEVDVLGNYHKVKLGGN

SEQ ID NO: 69 - protein, 1195 aa, Elusimicrobium minutum
MQKNINTKQNHIYIKQAQKIKEKLGDKPYRIGLDLGVGSIGFAIVSMEENDGNVLLPKEIIMVGSRIFKASAGAADRKLSRGQRNNHRHTRERMRYLWKVLAEQKLALPVPADLDRKENSSEGETSAKRFLGDVLQKDIYELRVKSLDERLSLQELGYVLYHIAGHRGSSAIRTFENDSEEAQKENTENKKIAGNIKRLMAKKNYRTYGEYLYKEFFENKEKHKREKISNAANNHKFSPTRDLVIKEAEAILKKQAGKDGFHKELTEEYIEKLTKAIGYESEKLIPESGFCPYLKDEKRLPASHKLNEERRLWETLNNARYSDPIVDIVTGEITGYYEKQFTKEQKQKLFDYLLTGSELTPAQTKKLLGLKNTNFEDIILQGRDKKAQKIKGYKLIKLESMPFWARLSEAQQDSFLYDWNSCPDEKLLTEKLSNEYHLTEEEIDNAFNEIVLSSSYAPLGKSAMLIILEKIKNDLSYTEAVEEALKEGKLTKEKQAIKDRLPYYGAVLQESTQKIIAKGFSPQFKDKGYKTPHTNKYELEYGRIANPVVHQTLNELRKLVNEIIDILGKKPCEIGLETARELKKSAEDRSKLSREQNDNESNRNRIYEIYIRPQQQVIITRRENPRNYILKFELLEEQKSQCPFCGGQISPNDIINNQADIEHLFPIAESEDNGRNNLVISHSACNADKAKRSPWAAFASAAKDSKYDYNRILSNVKENIPHKAWRFNQGAFEKFIENKPMAARFKTDNSYISKVAHKYLACLFEKPNIICVKGSLTAQLRMAWGLQGLMIPFAKQLITEKESESFNKDVNSNKKIRLDNRHHALDAIVIAYASRGYGNLLNKMAGKDYKINYSERNWLSKILLPPNNIVWENIDADLESFESSVKTALKNAFISVKHDHSDNGELVKGTMYKIFYSERGYTLTTYKKLSALKLTDPQKKKTPKDFLETALLKFKGRESEMKNEKIKSAIENNKRLFDVIQDNLEKAKKLLEEENEKSKAEGKKEKNINDASIYQKAISLSGDKYVQLSKKEPGKFFAISKPTPTTTGYGYDTGDSLCVDLYYDNKGKLCGEIIRKIDAQQKNPLKYKEQGFTLFERIYGGDILEVDFDIHSDKNSFRNNTGSAPENRVFIKVGTFTEITNNNIQIWFGNIIKSTGGQDDSFTINSMQQYNPRKLILSSCGFIKYRSPILKNKEG

SEQ ID NO: 70 - protein, 1101 aa, Akkermansia muciniphila
MSRSLTFSFDIGYASIGWAVIASASHDDADPSVCGCGTVLFPKDDCQAFKRREYRRLRRNIRSRRVRIERIGRLLVQAQIITPEMKETSGHPAPFYLASEALKGHRTLAPIELWHVLRWYAHNRGYDNNASWSNSLSEDGGNGEDTERVKHAQDLMDKHGTATMAETICRELKLEEGKADAPMEVSTPAYKNLNTAFPRLIVEKEVRRILELSAPLIPGLTAEIIELIAQHHPLTTEQRGVLLQHGIKLARRYRGSLLFGQLIPRFDNRIISRCPVTWAQVYEAELKKGNSEQSARERAEKLSKVPTANCPEFYEYRMARILCNIRADGEPLSAEIRRELMNQARQEGKLTKASLEKAISSRLGKETETNVSNYFTLHPDSEEALYLNPAVEVLQRSGIGQILSPSVYRIAANRLRRGKSVTPNYLLNLLKSRGESGEALEKKIEKESKKKEADYADTPLKPKYATGRAPYARTVLKKVVEEILDGEDPTRPARGEAHPDGELKAHDGCLYCLLDTDSSVNQHQKERRLDTMTNNHLVRHRMLILDRLLKDLIQDFADGQKDRISRVCVEVGKELTTFSAMDSKKIQRELTLRQKSHTDAVNRLKRKLPGKALSANLIRKCRIAMDMNWTCPFTGATYGDHELENLELEHIVPHSFRQSNALSSLVLTWPGVNRMKGQRTGYDFVEQEQENPVPDKPNLHICSLNNYRELVEKLDDKKGHEDDRRRKKKRKALLMVRGLSHKHQSQNHEAMKEIGMTEGMMTQSSHLMKLACKSIKTSLPDAHIDMIPGAVTAEVRKAWDVFGVFKELCPEAADPDSGKILKENLRSLTHLHHALDACVLGLIPYIIPAHHNGLLRRVLAMRRIPEKLIPQVRPVANQRHYVLNDDGRMMLRDLSASLKENIREQLMEQRVIQHVPADMGGALLKETMQRVLSVDGSGEDAMVSLSKKKDGKKEKNQVKASKLVGVFPEGPSKLKALKAAIEIDGNYGVALDPKPVVIRHIKVFKRIMALKEQNGGKPVRILKKGMLIHLTSSKDPKHAGVWRIESIQDSKGGVKLDLQRAHCAVPKNKTHECNWREVDLISLLKKYQMKRYPTSYTGTPR

SEQ ID NO: 71 - protein, 1187 aa, Bifidobacterium longum
MLSRQLLGASHLARPVSYSYNVQDNDVHCSYGERCFMRGKRYRIGIDVGLNSVGLAAVEVSDENSPVRLLNAQSVIHDGGVDPQKNKEAITRKNMSGVARRTRRMRRRKRERLHKLDMLLGKFGYPVIEPESLDKPFEEWHVRAELATRYIEDDELRRESISIALRHMARHRGWRNPYRQVDSLISDNPYSKQYGELKEKAKAYNDDATAAEEESTPAQLVVAMLDAGYAEAPRLRWRTGSKKPDAEGYLPVRLMQEDNANELKQIFRVQRVPADEWKPLFRSVFYAVSPKGSAEQRVGQDPLAPEQARALKASLAFQEYRIANVITNLRIKDASAELRKLTVDEKQSIYDQLVSPSSEDITWSDLCDFLGFKRSQLKGVGSLTEDGEERISSRPPRLTSVQRIYESDNKIRKPLVAWWKSASDNEHEAMIRLLSNTVDIDKVREDVAYASAIEFIDGLDDDALTKLDSVDLPSGRAAYSVETLQKLTRQMLTTDDDLHEARKTLFNVTDSWRPPADPIGEPLGNPSVDRVLKNVNRYLMNCQQRWGNPVSVNIEHVRSSFSSVAFARKDKREYEKNNEKRSIFRSSLSEQLRADEQMEKVRESDLRRLEAIQRQNGQCLYCGRTITFRTCEMDHIVPRKGVGSTNTRTNFAAVCAECNRMKSNTPFAIWARSEDAQTRGVSLAEAKKRVTMFTFNPKSYAPREVKAFKQAVIARLQQTEDDAAIDNRSIESVAWMADELHRRIDWYFNAKQYVNSASIDDAEAETMKTTVSVFQGRVTASARRAAGIEGKIHFIGQQSKTRLDRRHHAVDASVIAMMNTAAAQTLMERESLRESQRLIGLMPGERSWKEYPYEGTSRYESFHLWLDNMDVLLELLNDALDNDRIAVMQSQRYVLGNSIAHDATIHPLEKVPLGSAMSADLIRRASTPALWCALTRLPDYDEKEGLPEDSHREIRVHDTRYSADDEMGFFASQAAQIAVQEGSADIGSAIHHARVYRCWKTNAKGVRKYFYGMIRVFQTDLLRACHDDLFTVPLPPQSISMRYGEPRVVQALQSGNAQYLGSLVVGDEIEMDFSSLDVDGQIGEYLQFFSQFSGGNLAWKHWVVDGFFNQTQLRIRPRYLAAEGLAKAFSDDVVPDGVQKIVTKQGWLPPVNTASKTAVRIVRRNAFGEPRLSSAHHMPCSWQWRHE

SEQ ID NO: 72 - protein, 166 aa, uncultured Termite
MNKVQEIEYKKIREKLADREYRIGLDLGVGSIGYVVVSLKECNDLSYLPEDIILSGSRIFKSSIGAVERREFRLQRNSHRHHRERMRFLWQLLAEKQLALQSSKDLEKKENSADCETSQKRFPINILKEDPYILRYKALEEKLSLFQLGYVLYHIANHSNTAYENT

SEQ ID NO: 73 - protein, 1032 aa, uncultured Termite
MLYHIANHRGTDSVRSFLEYDDDKIKENTLTAKIAKETKKVIDAKKYRTFGEYLYKGKIEKFQQNIRKKVSNRKTPANKNKEFAVTRDVIIKETEKILASQKQYYTYILTDEYIKKIKDAISYQTEKLIPESGYCPYFKDEKRLPRSHKLNEYRRMYEALNNAKYFDPVLDENTGEILSYQEKEFSREEKKILFDEVLLKGMELTESGAKKLLYHLPDGCEVQLQGRDKTTQKIKGYALVDLEASPFWLRLSQQQQDEFLYDWNSLPLEKLKPKLTNYYSLTESEVDETFQEIKLPSNYASVGKKAMEILLTYIKDGCSYTEALEKAVSEGKLKVDKQTMIYDSLPYYGKILKESTQKLIGKAFSKQFADRNYKEPDTNKNEREFGKIANPVVHQTLNELRKLINEIITVFGKKPLEIGLETTRELKKSKKNREYLSKQQNKNEYARNRIYKEYIEPHLSQIKSRQENPSKYISKFELLEEQNFICPFCSEKITPDDIINSKVDVEHIFPIEESEDITKNNLVIAHNECNADKGKKSPFDAFGDKTSGKYRWNCILHNAQKNLPHKVWRFYQGSLEKFLENKPMSRRFGTDNSYISKIAARYLACLFNDPYHSEIFCIKSSLIAQLRIAWDLNSIMVPLVKNILSEKELEEFKISKNKKIRIDNRHHALDAIVIAYANRGYHNFLNRIHAKEYKINYREKSWLSKILLPPLNRDLEDFKISVKDSIEKANVSIKHDHNTNGSLVKATAYKVYYSGAGEYIITTSKNVEEISFKEKEDPKDTLYRALCKFECRDIDIKDEKLIKKLKYNSTLYKKVQNNLSKAKQELEQDNKKTEEEGKKSQKITEVRIYKKACSLVKGQYIQCGSRLKDKFFAVKEPTEIKTGLGYDTGDNLFLDLYYDKTGKLCGEIIRKVNFNRNKPNYQKEGYTLFERIYQSDILEVDTSEDRISLKNKTGSAPSDRTFIKVNTFTEVNAYFDGKRDKIQIFFGNLLKSSFKNDSFFISSMQKYNVRKVILTSLGIIKYRSQILKNKEV

SEQ ID NO: 74 - protein, 1032 aa, uncultured Termite
MKKRILGLDIGIASVGWALVEFDDEFQDNKKKGTIIKSGVRIFTRAETPKERESLAKPRREARSQRRRIRRRVERLNSIRELFVKNGVVEEWSVSKKNPNNIYITLNQIKTPWQLRMESLDRKLTNEQFAVVLTHLAKHRGYKSLRKDDKAGKVLEAISQNKKRLNDSDYRTLGEMFCKNESYKEHKRNKGGEYINSVARELIEEEVEKIFVKQREKGNNFADVNTEREYLKIAFSQKPAGSISKMVGFCTFENGEKRAPRDSYSAELFKVLCTINNTTFTDMKTGEIRSFSKEEIGKTLETVKNVKDVKYAKIRKDLGLEDSVKFSGVDYRENAKSKGEGEIFVSMKTYHEIKSKIEKLSKEKWDNLKGNTELLDSIVNIIANLKDDESIKKEFQKLKIDEDIIDVLLNFEFKKFINLSFKALRKIIPFQFQGQKYITASTSAGYSLKQEGIKNKLVPPAKENINVAVVARAFAQTRKVINAVIRKYGQFDQINIELATELKNSKFDRSKIEEGQKKFQSQKDKIFKEVQELRGGMTPSSSLLLKYRLWREQDERCVYSGRKISFEDLLDTGFLDIDHIIPYSKSMDDSFNNKVLCLAEENRNKKNDIPFNYYQRIDRDWNLLISIITSMKNMKIAKKSRLLKQELSDIEGFIERNINDTRYATRYIKDFLENNLEFKENEFIKVKVQARSGGLTSVLSYNWGMSKDREESYFHHAKDAIIVACSTQGMVQYISKISQQYENDKDKMKKIKDKTENCIPKPWDSFRADVEESIEGIFVSFAPRHKVTGSAHKETIYSKKHLEKERYVTVKKSLDKIKLSDLENIPCNENCGIIRVLKERLEKFKNDSLKAFADPVHMPTKCPNKKGPVIRSVKIKESNKTGIEVRKGLAERGEMVRVDVFIKDKKYYLVPIYVSDFKNKDLPNKAIAALKLENEWIMIDKTYSFKFSLFKDDLIKIKKKKEEIFGYFGGVHRSTGTIKIKSRHKPKEIDEGIGSRCLLDFRKFQVDVLGNYTEVKHEKRMPAYITRKDKKH

SEQ ID NO: 75 - protein, 1361 aa, Lactobacillus casei
MTKLGKPYGIGVDIGSNSIGFAAVDENSHLIRLKGKTVIGARLFEEGKAAADRRASRTTRRRLSRNRWRLSFLRDFFESHITPTGPNFFMRQKYSEISPKDKARYKYEKRLFNDRTDAEFYQQYPTMYHLRNRLLTDPSKADVREIYFAIHHILKSRGHFLTSGYAKDFNTNKVALNEIFPALQDAYAQVYPDLDITFDENKVNEFKTVLLNEKATPSDTQRALVNLLLAEDGDKDILKQQKQVLTEFAKAVVGLKTKLNVALGTEVDSSEATVWNFSLGQLDDKWAGIESAMTDEGTEILDQIRDLYRARLLNGIVPAGKTLSQAKVDDYAQHHEDLELFKDYLKQLEDDGTAKAIRQLYDRYIDGDDAKPFVREDFVKALTKEVTAHPNAKSPELLERLAQPDFMLKQRNKANGAIPVQMQQRELDQIIKNQSVYYDWLAAPNPVEKHRKSMPYQLDELLNFRIPYYVGPLVTAKEQKAAQGGVFAWMVRKDPDGNITPYNFDEKVDREASANTFIQRMKTTDTYLIGEDVLPKQSLLYQRYEVLNELNNVRVNNEKLSIEQKQQVIRELFERHNSVTIKQFAENLRAHGDYAHIPEIRGLADEKRFLSSLSTYRQLKSLLPDAIDDPAKQADIENIIAWSTVFEDAAIFKTKLKEINWLDSQTITKLSNIRYRGWGQFSHKFLNGLTLGNGHTIIQELFLSNNNLMQILTDETLQKKMTELNADKLKAANINDAIDDAYTSPSNKKALRQVLRVIEDIKRAADGQDPSWLYVETADGGGTPGKRTRARQHQLQEIYANAAHELIDSAVRGELEDKIADKADFNDRLVLYFMQGGRDIYTGTPLNIDQLSSYDIDHILPQSLIKDNSLDNRVLVHAIINREKNATFASTIYAQKMNATWRQWHEAGLISGRKLRNLQMRPDQIDKYASGFVARQLVETRQIIKLTEQIVAAQYPETKIIAVKAGLSHQLREELEFPKNRDVNHYHHAFDAFLAARIGTYLLKRFPNLQAFFTYGKFKKADVKKLRGFNFIRDITHAEDKIVVKDTGEVIWDKKRDVDELDRIYNFKRMLITHEVHFEKADLFKQTVYGAKDSKEAGGKKQLISKKKGYPVDIYGGYTQETGSYLSVVRLTKKAMYAVVKVSTRDAAKLAVAKSISEQKENETLNDIIDEKLSKISKNGKITHELFEVVLPRVGQKTLFKNSKYNLFLVNSDTYMHNYQELWMPREYQKMWKDISLSKYGDAQTEDQLDQIFGFIVSQVNSYFNLYDINQFRKKLNDAADKFATLPMRDTDDMQGKIATIGQLLIGLQANAARSDLRNLDIKTPLGLLQIPNGISLDSDTSVVYQSPTGLLEREVHLSDL

SEQ ID NO: 76 - protein, 1348 aa, Streptococcus equi
MKKPYTIALDIGTNSVGWVVVTDDYRVPTKKMKVLGNTERKTIKKNLIGALLFDSGDTAEGTRLKRTARRRYTRRKNRLRYLKEIFTEEMAKVDDGFFQRLEDSFYVLEDKEGNKHPIFANLADEVAYHKKYPTIYHLRKELVDNPQKADLRLIYLAVAHIIKFRGHFLIEGTLSSKNNNLQKSFDHLVDTYNLLFEEQRLLTEGINAKELLSAALSKSKRLENLISLIPGQKKTGIFGNIIALSLGLTPNFKANFGLSKDVKLQLAKDTYADDLDSLLAQIGDQYADLFLAAKNLSDAILLSDILTESDEITRAPLSASMVKRYREHHKDLVTLKTLIKDQLPEKYQEIFLDKTKNGYAGYIEGQVSQEEFYKYLKPILARLDGSEPLLLKIDREDFLRKQRTFDNGSIPHQIHLEELHAILRRQEVFYPFLKDNRKKIESLLTFRIPYYVGPLARGHSRFAWVKRKFDGAIRPWNFEEIVDEEASAQIFIEKMTKNDLYLPNEKVLPKHSLLYETFTVYNELTKVKYATEGMTRPQFLSADQKQAIVDLLFKTNRKVTVKQLKENYFKKIECWDSVEITGVEDSFNASLGTYHDLLKIIQDKDFLDNPDNQKIIEDIILTLTLFEDKKMISKRLDQYAHLFDKVVLNKLERHHYTGWGRLSGKLINGIRDKQSGKTILDFLKADGFANRNFMQLIHDSELSFIDEIAKAQVIGKTEYSKDLVGNLAGSPAIKKGISQTIKIVDELVKIMGYLPQQIVIEMARENQTTAQGIKNARQRMRKLEETAKKLGSNILKEHPVDNSQLQNDKRYLYYLQNGKDMYTGDDLDIDYLSSYDIDHIIPQSFIKNNSIDNKVLTSQGANRGKLDNVPSEAIVRKMKGYWQSLLRAGAISKQKFDNLTKAERGGLTQVDKAGFIQRQLVETRQITKHVAQILDSRFNTEFDDHNKRIRKVHIITLKSKLVSDFRKEFGLYKIRDINHYHHAHDAYLNAVVAKAILGKYPQLAPEFVYGDYPKYNSFKERQKATQKMLFYSNILKFFKDQESLHVNSDGEEIWNANKHLPIIKNVLSIPQVNIVKKTEVQTGGFYKESILSKGNSDKLIPRKNNWDTRKYGGFDSPTVAYSVLVIAKMEKGKAKVLKPVKEMVGITIMERTAFEENPVVFLEARGYREIQEHLIIKLPKYSLFELENGRRRLLASASELQKGNELFLPVDYMTFLYLAAHYHELTGSSEDVLRKKYFVDRHLHYFDDIIQMINDFAERHILASSNLEKINHTYHNNSDLPVNERAENIINVFTFVALGAPAAFKFFDATIDRKRYTSTKEVLNATLIHQSVTGLYETRIDLSQLGEN

SEQ ID NO: 77 - protein, 1341 aa, Ruminococcus lactaris
MGKGYYVGLDMGTGSVGWAVTDESYQILRRHGKAMWGVRLFESAKTAEERRMFRTGRRRLDRRGWRIEILQEIFAEEISRVDPGFFLRMKESKYYPEDKRDIQGNCPELPYTLFVDKTFTDKDFHKKYPTIYHLRKMLMETEDTPDMRLVYLALHHMMKHRGHFLLSGDISQVTEFKNTFNQFIENIRNEEMDFEIELDESAVQMIEETLKDKNLTRSAKKSKLVKGLNAKNVRDKAFLTLLSGGTVKLSDLFGMEELNEGERPKISFADNGYEEYAAVVEMELGELYYIVESAKAVYDWAILSDILGGSTSVSDAKVRAYEKHKADLKYLKAVVKEYFPKEVYNAVFVESSDKLNNYPAYIGMTKKNGKKVSLEGKRCSREEFMDFLKKNIVVKLPDEEAKMYLQSELEKDSFLPKQVNKDNGVIPYQVHKYELKKILDNLGDKIPFLKENAEKIEKLFSFRIPYYVGPLRTGNGENSKFAWAERKSTEKIYPWNFENVIDVEQSAENFIRRMTNKCTYLIGEDVLPKDSLLYSKFMVLNELNNLRLDGQKISVELKQKIYRDVFCRSRKVTQKKLKSYLIREGIAGKNVELTGIDGDFKGSLTAYHDFKEKLIDVELTQKEKEEIILNIVLFGDDKKLLKQRLKKKFPQLTEKQINTVTALSYKGWGRLSKKLLEEVTVPAPETGEVWNIITALWETNDNFMQLLSKEYQFSDRIEEFNEEKADPEVSYQTIEDLYVSPAVKRQIWQTLQIIQEIEKVMGEKPKRVFVEMAREKQENKRTESRKKTLSDLYTKCKKEEPEWIEALCTSLEKHEEHQLRSDKLYLYYTQKGRCMYSGEPIDLEDLWDNTKYDIDHIYPQSKTMDDSLKNRVLVKKEYNAKKSDTYPIAADIQKKMMPFWKSLLTGGFIPKEKYDRLVRNNPLDANELAGFIERQIVETRQSTKAVAEILKKILPDTEIVYVKAKTVSKFRQDFDFIKVRDMNDLHHAKDAYLNIVVGNVYFVKFTKNAAWFVKENPGRTYNLEKMFIWDVARDGEIAWKAGKSGSIVQVRAMMEKNHILVTRRSYEVKGGLFDQQILKKGKGQVPVKESDERLRDIGKYGGYNKAAGVYFMLVSSKDKKGKEQRTIEFVPIYLKDRVEKDMESARNYLMEERGLREPKILIKKIKIDTLFKVDGFYMWLSGRTSNQLIFKGANQLILSKEDMKTLKKVVKYIQRQKEDKNVKISMRDGITEEELLKLYETFLDKIRHSIYGARLSSQEKTLVNGKEKFIDLSVEAKCQVLYEILHLFQCQSGAANLKMIGGPASAGILVMNNNISKCKNISIVNQSPTGIYEKEIDLLRV

SEQ ID NO: 78 - protein, 1003 aa, Gluconacetobacter diazotrophicus
MIDESLTFGIDLGIGSCGWAVLRRPSAFGRKGVIEGMGSWCFDVPETSKERTPTNQIRRSNRLLRRVIRRRRNRMAAIRRLLHAAGLLPSTDSDALKRPGHDPWELRARGLDKPLKPVEFAVVLGHIAKRRGFKSAAKRKATNISSDDKKMLTALEATRERLGRYRTVGEMFARDPDFASRRRNREGKYDRTTARDDLEHEVHALFAAQRRLGQGFASPELEEAFTASAFHQRPMQDSERLVGFCPFERTEKRAAKLTPSFERFRLLARLLNLRITTPDGERPLTVDEIALVTRDLGKTAKLSIKRVRTLIGLEDNQRFTTIRPEDEDRDIVARTGGAMTGTATLRKALGEALWTDMQERPEQLDAIVQVLSFFEANETITEKLREIGLTLAVLDVLLTALDAGVFAKFKGAAHISTKAARNLLPHLEQGRRYDEACTMAGYDHAASRLSHHGQIVAKTQFNALVTEIGESIANPIARKALIEGLKQIWAMRNHWGLPGSIHVELARDVGNSIEKRREIEKHIEKNTALRARERREVHDLLDLEDVNGDTLLRYRLWKEQGGKCLYTGKAIHIRQIAATDNSVQVDHILPWSRFGDDSFNNKTLCLASANQQKKRSTPYEWLSGQTGDAWNAFVQRIETNKELRGFKKRNYLLKNAKEAEEKFRSRNLNDTRYAARLFAEAVKLLYAFGERQEKGGNRRVFTRPGALTAALRQAWGVESLKKQDGKRINDDRHHALDALTVAAVDEAEIQRLTKSFHEWEQQGLGRPLRRVEPPWESFRADVEATYPEVFVARPERRRARGEGHAATIRQVKERECTPIVFERKAVSSLKEADLERIKDGERNEAIVEAIRSWIATGRPADAPPRSPRGDIITKIRLATTIKAAVPVRGGTAGRGEMVRADVFSKPNRRGKDEWYLVPVYPHQIMNRKAWPKPPMRSIVANKDEDEWTEVGPEHQFRFSLYPRSNIEIIRPSGEVIEGYFVGLHRNTGALIPTPVGPDSYVIA

SEQ ID NO: 79 - protein, 1368 aa, Streptococcus pyogenes
MDKKYSIGLDIGTNSVGWAVITDDYKVPSKKFKVLGNTDRHSIKKNLIGALLFDSGETAEATRLKRTARRRYTRRKNRICYLQEIFSNEIAKVDDSFFHRLEESFLVEEDKKHERHPIFGNIVDEVAYHEKYPTIYHLRKKLADSTDKADLRLIYLALAHMIKFRGHFLIEGDLNPDNSDVDKLFIQLVQTYNQLFEENPINASRVDAKAILSARLSKSRRLENLIAQLPGEKRNGLFGNLIALSLGLTPNFKSNFDLAEDAKLQLSKDTYDDDLDNLLAQIGDQYADLFLAAKNLSDAILLSDILRVNTEITKAPLSASMIKRYDEHHQDLTLLKALVRQQLPEKYKEIFFDQSKNGYAGYIDGGASQEEFYKFIKPILEKMDGTEELLAKLNREDLLRKQRTFDNGSIPHQIHLGELHAILRRQEDFYPFLKDNREKIEKILTFRIPYYVGPLARGNSRFAWMTRKSEETITPWNFEEVVDKGASAQSFIERMTNFDKNLPNEKVLPKHSLLYEYFTVYNELTKVKYVTEGMRKPAFLSGEQKKAIVDLLFKTNRKVTVKQLKEDYFKKIECFDSVEISGVEDRFNASLGTYHDLLKIIKDKDFLDNEENEDILEDIVLTLTLFEDREMIEERLKTYAHLFDDKVMKQLKRRRYTGWGRLSRKLINGIRDKQSGKTILDFLKSDGFANRNFMQLIHDDSLTFKEDLQKAQVSGQGDSLHEHIANLAGSPAIKKGILQTVKVVDELVKVMGRHKPENIVIEMARENQTTQKGQKNSRERMKRIEEGIKELGSDILKEYPVETTQLQNEKLYLYYLQNGRDMYVDQELDINRLSDYDVDHIVPQSFLKDDSIDNKVLTRSDKNRGKSDNVPSEEVVKKMKNYWKQLLNAKLITQRKFDNLTKAERGGLSELDKAGFIKRQLVETRQITKHVAQILDSRMNTKYDENDKLIREVRVITLKSKLVSDFRKDFQFYKVREINNYHHAHDAYLNAVVGTALIKKYPKLESEFVYGDYKVYDIRKMIAKSEQEIGKATAKYFFYSNIMNFFKTEITLANGEIRKRPLIETNGETGEIVWDKGRDFATVRKVLSMPQVNIVKKTEVQTGGFSKESILPKRNSDKLIARKKDWDPKKYGGFDSPTVAYSVLVVAKVEKGKSKKLKSVKELVGITIMERSSFEKDPVDFLEAKGYKEVRKDLIIKLPKYSLFELENGRKRMLASAGELQKGNELALPSKYVNFLYLASHYEKLKGSPEDNEQKQLFVEQHKHYLDEIIEQISEFSKRVILADANLDKVLSAYNKHRDKPIREQAENIIHLFTLTNLGAPAAFKCFDTTIGRNRYKSIKEVLDATLIHQSITGLYETRIDLSQLGGD

SEQ ID NO: 80 - protein, 1504 aa, Bacteroides dorei
MKNIVGLDLGTNSIGWAVVNGSVNDDGSEQLVKIQASGSRIIPMDAAMIGDFNKGNSISQTAERTRLRGVRRLSERYLLRRERLHRILDILGFLPFHFAQDLDRHGKIVKGKEPKLAWRKNEAGQFEFIFQDSFKEMLEDFKLNYPNLITDDKKVPYDWTIYYLRKKGLTSKISKEELAWILLNFNQKRGYYQLRGEEEEENKDKLVEFYALKVVAVEDSGEKKGKDIWYNVHLENGWVYRRTSNMSLDWVGKTKEFIVTTDLEKDGTPKKDKEGNVKRSFRAPKEDDWSLVKKKTEADIDQTHKTVGAYIYDTLLGNPSQKIRGRLVRTIERKYYKEELKLILEKQKEFHLELQDRALYAACIEELYPINEAHRNNVGNRDFTYLFLEDILFYQRPLKSKKSLIDNCPYEENQGLDKETGEIKSFPVKCIAKSHPLFQEFRLWQFIINLRIYRKDLAQDVDVTNELLKTEEDYVALFDWLNGKKEIDQKAFLKYPVFGLKKEIENYRWNYVQDKPYPCNETRSLMLARLEKCDISIEFLTKENEEALWHILYSVEDKNEIVKALQKFADKHDLNASFVDVFQKFPPFKKEYGSYSAKAIKKLLPLMRMGKYWSENSIDKGTRERIDKIITGEYDEKIENRVREKAIHLADVSDFKGLPLWLVCYIVYGRHSEAKEIIQWKSPADIDSYLRSFKQHSLRNPIVEQIIIETLRVVRDIWKQVGNIDEIHVELGREMKNPADKRKKMTQQMSENENTNLRIKYLLTEFLNPEYEVENVRPYSPSQQDILRIYEEGVLNSVSDLPEEISDILKKFTETDLKKRPSRSEVLRYKLWLEQKYRSPYTGEVIPLGKLFTPAYEIEHVIPQSYYFDDSFSNKVICEAEVNKLKSNLLGHEFIVKHHGEIVELPFGKKVRIFTVDEYEQFVKDNYSRTRSKMKKLLMDDIPEEFVTRQLNDSRYISKVVKSLLSNIVREKGEEEAISKNVIPCTGGVTDRLKKDWGINEVWNKIILPRFQRLNELTGTNKFTTKNVGIQEIPTMPLELQKGFNKKRIDHRHHAMDAIIIACANRNIINYLNNKSATAKAELSRYDLQKMLCDKAKTDNNGNYKWVIRKPWASFTQDTYLALENIIVSFKQNLRVINKATNRFLHYNEEGKKIFVKQGKGDNWAIRKSMHKDTVFGEVNLRRIKTVALNEAMKNPQSIVVKDFKRKLLELWNLGFDAKRIKKYFEDNRETWSDINLSKIEVYYFSKDTKDRFFATRKPLDTSFDRKKIENNITDTGIQKILLRHLELKDNNPDIAFSPDGIDEMNRNIIQLNNGKYHQPIIKIRWYEQADKFAVGQTGNKSSKFVEAAKGTNLFFAVYESNILDKKTNTIIKKRNYATIPLNVAIERQKQGLPVAPEDENGNDPIFVLSPNDLVYLPTDDELANGIIAQPLDRGRIYKMVSSSGEQCFFIKHIVANVLVDKFEFSPLNKMERALTGEMIKMICIPIKVDRLGNVLESSSSYKK

SEQ ID NO: 81 - protein, 1426 aa, Capnocytophaga sputigena
MKNILGLDLGITSISFAHIVEDENKEKSEIKELGVRIVSLTTDEQSDFEKGKSITTNANRTLKHGARLNLDRYQQRRKYLIDLLQKANLITSSSILAENGKNTTHSTWQLRAKAVTERIEKEEFARVLLAINKKRGYKSSRKAKTEDEGQAIDGMAIAKRLYDENLTPGQLSLQLLQQNKKLLPDFYRSDLQREFDLVWNFQKQFYPDILTDSFYKELQGKGKDATSKAFSKRYHFDTAENKGSKESVRLQAYQWRAEAISKQLSKEEVAYVLTEINNNLNNASGYLGAISDRSKELYFNRQTVGQYLYAQLQENRHNSLKNKVFYRQDYLDEFERIWETQASFHKELTDELKKQIRDVVIFYQRKLKSQKGLISFCEFESKEIEIEKDGKTITKTIGARVVPKSSPLFQEFKIWQILNNVTCKRKGIRKKKSSAKSTELDLFNEPSQTIFSLDMECKQLLFDELNLKGDLKSDKVLKLLGYSPQEWEINYNQLEGNRTQKALYEAYLKIVEMEAHDVKDILQIKSAKDDWSLDESPLSASEIKEKVKDIFQALGICTKILYFDPLLPVKEFEKQDSYQLWHLLYSYESDDSTSGNETLYRILEKKYAFKREHARILANVALQDDYGSLSTKAIRKIYPNIKENQYSKACELAGYKHSKLSLTTEELEARELKNIIPLLKKNALRNPVVEKILNQMINVVNALIEKNSERDAEGKITKYFHFDEIRIELARELKKNAQKRYEMTQNINKAKLEHQKISEILQKKFGIKNPTKSDIIRYRLYQELEHNGYKELYTNAPIARDMLFSKNIEIEHIVPKARVFDDSFSNKTLTFHRINSNKGEYTAFDYITSLNSEEELNQYLTRVENAYKTKSISLTKYKNLLKKASEIGDGFINRDLRDTQYIAKKAKEILFQVTKNVLSTSGSITDRLREDWGLVDVMKELNMPKYQSLGLTEVEERKEGNKVTVIKNWTKRNDHRHHAMDALTVAFTKPSYIQYLNHLNARKDENNKNYSVILAIEEKETIKVPTNNGKNKRVFIEPIPNFRQVAKKHLEEIFISHKAKNKVVTKNVNKPAGTDKQQITLTPRGQLHKETIYGKYQYYVNKEEKVGVKFDERTITKVSNPLYREALLKRLQANDNDPKKAFTGKNALSKNPIYLDETKTKTLPEKVNLTYLEEDFSIRKDISPDNFKDLKSIEKVIDQGVKRILIKRLQDYDNDPKKAFVDLEKNPIWLNKEKGIAIKRVTISGVSNAQPLHIGKDHLGKTTLNKEGNEIPVDYVSTGNNHHVAIYRDKEGNLQEQIVSFFEAVVRTQQGLPIIDKTYKQEEGWQFLFTMKQNEMFVFPNATTGFNPAEIDLLDPKNKKLISPNLFRVQKIATKDYFFRHHLETNVETDNVLKNTTWKREGLSGLKDIVKVRINHLGDIVSIGEY

SEQ ID NO: 82 - protein, 1443 aa, Parabacteroides johnsonii
MIKLLYLEKLKQYTMKKILGLDLGTSSIGWALVNEAENSDEVSSIIKLGVRVNPLTVDEMQNFEKGKSITTNADRTLKRSMRRNLQRYKLRRDALIELLKKVGFITDKTILSEQGNRTTFETYRLRAKAAEEEISLKELARVLLMINKKRGYKSSRKAKGEEEGALIDGMEIAKKLYDEDLTPGQLCLQLLESGKKFFPDFYRSDLQEEFNKIWDFQKQFNLFSFCDVAKEEVKGKNKSQTWAILAKYFVETKKVNVWNEHEAQTENREEVYKLVGLKRTVKGEELKKENYRWRVQALTEQLDLEKIAVVLQEINGQISASSGYLGAISDRSKVLYFNRQTVGQYQMAELNKNPNMSLRNMVFYRQDYLDEFNVIWEKQAEFHKELTPELKKEIRDIIIFYQRRLKSQKGLISFCEFENREVVVEKEGKKQTKIIGCKVIPRSHPLFQEFKIWQTLNNIEVFVGEKKGKRKKSNVSSDLFGDTEDALITEGRRFLYQEEKKILAKELSIKKGLTKAEILRLLFENPQELDINFKQIDGNQTGFALFSAYSNMIEKYGYEPLDFKKPAEDLISQLKTVFTDLGWNTDLLFIDLDKENKEWEKQPYFRLWHLLYSFEGDNTPTGNGKLIEKIMQLCGIEKEYAIELANVSLQDDYGSLSAKAIKKILLYLKEGNQYDMACEYAGYRHSKSSLTKEEIENKVLKDKLEILPKNSLRNPVVEKILNQMVNVINTVMEVYGRPDEIRVELARELKKSAKEREELTKAVAKNTREHEEIRKVLQSEFGMINVSRNDIIRYKLYEELKDNGYKTLYSNQYIPREKLFSKEIDIEHIIPQSRLFDDSLSNKTLEYKSINIEKGNKTAYDFVKEKYGEEGLQQYLNRCENLCKDKKAKLRKLKMELNEIPDGFIDRDLRNTQYIAKKALSMLTEICRRVVATTGSITDKLREDWQLVDVMKELNLPKYEALGLVEVYEDKDGRKIKRIKDWTKRNDHRHHAMDALTVAFTKDVFIQYFNNKNAAWESDSKEHTNIVGIKTRYFESGKAVPPIPLGQFRVEAKCHLENLLVSIKAKNKVVTTNVNCIKKKGGTYKNTQQTPRGQLHLETIYGSHNQYVTKIEKVNASFDAVKIATVSKQDYRNALLKRLEVFGNDPKKAFTGKNSLEKNPIYLDRAQTIQVPDKVQTVELETAYTIRKPVDPTLNVDKVVDKKIRLILEQRLKEYGGDAKKAFVNLDENPIWLNEEKGISIKRVTIRGISKAQALHDKKDKDGNFILDETGKRIPVDFVNTGNNHHVAIYRKPVLDKKGQVIFDDEGNPMYELDEDVVPFFEAVTRANLGIPIIDKDYKKSEGWQFLFSMKQNEYFVFPNEKTGFNPKEVDLLDPDNYAMISPNLFRVQKIGLNDYTFRHHLETTIQNDLKFITWIRCGKSGIKDIVKVRINHIGQIVSVGEY

SEQ ID NO: 83 - protein, 984 aa, Campylobacter jejuni
MARILAFDIGISSIGWAFSENDELKDCGVRIFTKVENPKTGESLALPRRLARSARKRLARRKARLNHLKHLIANEFKLNYEDYQSFDESLAKAYKGSLISPYELRFRALNELLSKQDFARVILHIAKRRGYDDIKNSDDKEKGAILKAIKQNEEKLANYQSVGEYLYKEYFQKFKENSKEFTNVRNKKESYERCIAQSFLKDELKLIFKKQREFGFSFSKKFEEEVLSVAFYKRALKDFSHLVGNCSFFTDEKRAPKNSPLAFMFVALTRIINLLNNLKNTEGILYTKDDLNALLNEVLKNGTLTYKQTKKLLGLSDDYEFKGEKGTYFIEFKKYKEFIKALGEHNLSQDDLNEIAKDITLIKDEIKLKKALAKYDLNQNQIDSLSKLEFKDHLNISFKALKLVTPLMLEGKKYDEACNELNLKVAINEDKKDFLPAFNETYYKDEVTNPVVLRAIKEYRKVLNALLKKYGKVHKINIELAREVGKNHSQRAKIEKEQNENYKAKKDAELECEKLGLKINSKNILKLRLFKEQKEFCAYSGEKIKISDLQDEKMLEIDHIYPYSRSFDDSYMNKVLVFTKQNQEKLNQTPFEAFGNDSAKWQKIEVLAKNLPTKKQKRILDKNYKDKEQKNFKDRNLNDTRYIARLVLNYTKDYLDFLPLSDDENTKLNDTQKGSKVHVEAKSGMLTSALRHTWGFSAKDRNNHLHHAIDAVIIAYANNSIVKAFSDFKKEQESNSAELYAKKISELDYKNKRKFFEPFSGFRQKVLDKIDEIFVSKPERKKPSGALHEETFRKEEEFYQSYGGKEGVLKALELGKIRKVNGKIVKNGDMFRVDIFKHKKTNKFYAVPIYTMDFALKVLPNKAVARSKKGEIKDWILMDENYEFCFSLYKDSLILIQTKDMQEPEFVYYNAFTSSTVSLIVSKHDNKFETLSKNQKILFKNANEKEVIAKSIGIQNLKVFEKYIVSALGEVTKAEFRQREDFKK

SEQ ID NO: 84 - protein, 1082 aa, Neisseria meningitidis
MAAFKPNPINYILGLDIGIASVGWAMVEIDEDENPICLIDLGVRVFERAEVPKTGDSLAMARRLARSVRRLTRRRAHRLLRARRLLKREGVLQAADFDENGLIKSLPNTPWQLRAAALDRKLTPLEWSAVLLHLIKHRGYLSQRKNEGETADKELGALLKGVADNAHALQTGDFRTPAELALNKFEKESGHIRNQRGDYSHTFSRKDLQAELILLFEKQKEFGNPHVSGGLKEGIETLLMTQRPALSGDAVQKMLGHCTFEPAEPKAAKNTYTAERFIWLTKLNNLRILEQGSERPLTDTERATLMDEPYRKSKLTYAQARKLLGLEDTAFFKGLRYGKDNAEASTLMEMKAYHAISRALEKEGLKDKKSPLNLSPELQDEIGTAFSLFKTDEDITGRLKDRIQPEILEALLKHISFDKFVQISLKALRRIVPLMEQGKRYDEACAEIYGDHYGKKNTEEKIYLPPIPADEIRNPVVLRALSQARKVINGVVRRYGSPARIHIETAREVGKSFKDRKEIEKRQEENRKDREKAAAKFREYFPNFVGEPKSKDILKLRLYEQQHGKCLYSGKEINLGRLNEKGYVEIDHALPFSRTWDDSFNNKVLVLGSENQNKGNQTPYEYFNGKDNSREWQEFKARVETSRFPRSKKQRILLQKFDEDGFKERNLNDTRYVNRFLCQFVADRMRLTGKGKKRVFASNGQITNLLRGFWGLRKVRAENDRHHALDAVVVACSTVAMQQKITRFVRYKEMNAFDGKTIDKETGEVLHQKTHFPQPWEFFAQEVMIRVFGKPDGKPEFEEADTPEKLRTLLAEKLSSRPEAVHEYVTPLFVSRAPNRKMSGQGHMETVKSAKRLDEGVSVLRVPLTQLKLKDLEKMVNREREPKLYEALKARLEAHKDDPAKAFAEPFYKYDKAGNRTQQVKAVRVEQVQKTGVWVRNHNGIADNATMVRVDVFEKGDKYYLVPIYSWQVAKGILPDRAVVQGKDEEDWQLIDDSFNFKFSLHPNDLVEVITKKARMFGYFASCHRGTGNINIRIHDLDHKIGKNGILEGIGVKTALSFQKYQIDELGKEIRPCRLKKRPPVR

SEQ ID NO: 85 - protein, 1021 aa, Clostridium cellulolyticum
MKYTLGLDVGIASVGWAVIDKDNNKIIDLGVRCFDKAEESKTGESLATARRIARGMRRRISRRSQRLRLVKKLFVQYEIIKDSSEFNRIFDTSRDGWKDPWELRYNALSRILKPYELVQVLTHITKRRGFKSNRKEDLSTTKEGVVITSIKNNSEMLRTKNYRTIGEMIFMETPENSNKRNKVDEYIHTIAREDLLNEIKYIFSIQRKLGSPFVTEKLEHDFLNIWEFQRPFASGDSILSKVGKCTLLKEELRAPTSCYTSEYFGLLQSINNLVLVEDNNTLTLNNDQRAKIIEYAHFKNEIKYSEIRKLLDIEPEILFKAHNLTHKNPSGNNESKKFYEMKSYHKLKSTLPTDIWGKLHSNKESLDNLFYCLTVYKNDNEIKDYLQANNLDYLIEYIAKLPTFNKFKHLSLVAMKRIIPFMEKGYKYSDACNMAELDFTGSSKLEKCNKLTVEPIIENVTNPVVIRALTQARKVINAIIQKYGLPYMVNIELAREAGMTRQDRDNLKKEHENNRKAREKISDLIRQNGRVASGLDILKWRLWEDQGGRCAYSGKPIPVCDLLNDSLTQIDHIYPYSRSMDDSYMNKVLVLTDENQNKRSYTPYEVWGSTEKWEDFEARIYSMHLPQSKEKRLLNRNFITKDLDSFISRNLNDTRYISRFLKNYIESYLQFSNDSPKSCVVCVNGQCTAQLRSRWGLNKNREESDLHHALDAAVIACADRKIIKEITNYYNERENHNYKVKYPLPWHSFRQDLMETLAGVFISRAPRRKITGPAHDETIRSPKHFNKGLTSVKIPLTTVTLEKLETMVKNTKGGISDKAVYNVLKNRLIEHNNKPLKAFAEKIYKPLKNGTNGAIIRSIRVETPSYTGVFRNEGKGISDNSLMVRVDVFKKKDKYYLVPIYVAHMIKKELPSKAIVPLKPESQWELIDSTHEFLFSLYQNDYLVIKTKKGITEGYYRSCHRGTGSLSLMPHFANNKNVKIDIGVRTAISIEKYNVDILGNKSIVKGEPRRGMEKYNSFKSN

SEQ ID NO: 86 - protein, 1131 aa, Acidovorax ebreus
MAQHVFGLDIGIASVGWAILGEQRIIDLGVRCFDKAETAKEGDPLNLTRRQARLLRRRLYRRAWRLTQLSRLLKRKGLIADAKLFAKAPSYGDSAWELRRQGLDRLLTPLEWARVIYHQCKHRGFHWTSKAEEAKADSDAEGGRVKQGLAHTKALMQAKNYRSAAEMVLAEFPDAQRNKRGQYDKALSRVLLGEELALLFATQRRLGNPHASDFFEKLILGDGDRKSGLFWQQKPALSGADLLKMLGKCTFEKGEYRAPKASFSVERHVWLTRLNNLRIVVDGRSRPLNEAERQAALLLPYQTETSKYKTLKNAFIKAGLWGDGVRFGGLAYPSQAQIDAEKTKDPEDQFLVKLPAWHELRKAFKAAGHEALWQQISTPALDGDPTLLDQIATVLSVYKDGAEVVQQLRQLALPEPAASIAVLEKISFDKFSSLSLKALRRIVPLMQSGLRYDEAVAQIPEYGHHSQRIEPGAAKHLYLPPFYEAQRKYAGKGDHIGSMQFRDDADIPRNPVVLRALNQARKVVNALIREYGSPIAVNIEMARDLSRPLDERNKVKRAQEEFRDRNDRARSEFERDFGYKPKAAAFEKWMLYREQLGQCAYSQQPLDIQRVLDDHNYAQVDHALPYSRSYDDSKNNKVLVLTHENQNKGNRTAFEYLTSFPDGEDGERWRTFVAWVQGNKAYRMAKRNRLLRKNYGVDESKGFIDRNLNDTRYICKFFKNYVEEHLQLAARADGDTARRCVVVNGQLTAFLRARWGLTKVRGDSDRHHALDAAVVAACTHGMVKALADYSRRKEISFLQEGFPDPETGEILNPAAFDRARQHFPEPWTHFAHELKARLFTDDLAALREDMQRLGSYTTEDLGRLRTLFVSRAPQRRSGGAVHKETIYAQPESLKQQGGVIEKILLTSLKLQDFDKLLNPESNDHFVEPHRNERLYAAIRQRLEQFGGRADKAFGPDNLFHKPDKNNQPTGPVVRSIKLVRGKQTGIPIRGGLAKNDSMLRVDIFTKAGKFHLVPVYVHHRVTGLPNRAIVAFKDEDEWTLIDESFAFLFSVYPNDYVKVTLKKEQQSGYYSGADRSTGAMNLWAHDRAASVGKDGLIRGIGVKTALSVEKFNVDVLGRIYLAPPETRSGLA

SEQ ID NO: 87 - protein, 1122 aa, Streptococcus suis
MSNGKILGLDIGIASVGVGVIDAQTGEIIHASSRIFPSANAANNAERRTFRGSRRLIRRKKHRIKRLDDLFNDFHINLDGEMSTDNPYVLRVKGLSQKLTVEELYISIKNIMKRRGISYLDDAESDNEAGRSDYAKAIERNRQLLTSKTPGEIQLERLEKYGQLRGNFTIIDEEGQSQQIINVFSTSDYVKEVEKILDCQKMYHKFISDEFCDKLIELLREKRKYYVGPGNEKSRTDYGIYRTDGTTLENLFGILIGKCTFYPDQYRSSRASYTAQEFNFLNDLNNLTVPTETKKLSQEQKEFLVNYAKETSVLGAGKILQQIAKLADCKVEDIRGYRLDNKDKPELHTFETYRAMKGLVPLVDIGVLSREQLDILADILTLNTDFEGIREALKKQLPNVFDEKQVKGLASFRKSKSQLFAKGWHNLSQKIMLEVIPELYATSDEQMTILTRLGKFEKSSVAEYPSSINVDEITDEIYNPVVAKSIRQTIKIINASIKKWGEFDQIVIEMPRDRNEDEEKKRIADGQKANAKEKADSILRAAELYCAGKVLPDYVYNGHNQLATKIRLWYQQGERCIYTGQPISIHDLIHNQNQYEIDHILPLSLTFDDSLSNKVLVLATANQEKAQRTPYNYLKSATSAWSYREFKDYVTKRKGIGKKKCEYLTFEEDINGFEVRSKFIQRNLVDTRYASKVILNALQDYFKISGIQTKVSVVRGQFTSQLRHKWGIEKTRETYHHHAVDALIIAASSQLRLWKKQESPLVVDYQEGRQVDLETGEILELTDEQYKELVYQPPYQGFVNTISSSAFDNEILFSYQVDSKVNRKISDATIYATRNAQLGKDKTEGIYVLGKIKDIYTQAGYEAFLKRYTKDKTSFLMYHKDLDTWEKVIEIILRDYREYDEKGKEIGNPFERYRRENGYVKKYSRKGNGTAIKSLKYYDNKLGNHIDITPENSRNAVVLQSLKPWRTDVYFNKETGKYEFLGIKYSDLSFEKGTGEYGISQEKYDSIKIAEGVAKKSIFKFTLYKQDLLFIKDIENNFGKLLRFTSKNDTSKHYVELKPYDKNKFGTEEPLLPVLGNVAKSGQCIKGLNKSNISIYKVRTDILGYRHFIKQEGEHPQLKFKK

SEQ ID NO: 88 - protein, 1509 aa, Bacteroides coprophilus
MKKTLGLDLGTNSIGWAVINSNIDSEGKEKLVGISSCGSRIIPMDATTLGDFGKGNTKSPVAERTRLRGIRRLLERSLLRRERLHRVLSVMGFLPEHYASQLDRYGKFLPETEPKLAWYKDDSGRYQFLFQKSFHEMLEDFRQHQPELVAGEKKIPYDWTIYYLRKKALSQEITKEELAWILLNFNQKRGYYQLRGEEEQEENNKSVEYHALKVVSVEDSGERKGKDIWYNVTLENGWVYRRASNIPLDWTGKVKEFVVTTELDDAGNPKKDKEGNVKRSFRAPKEDDWGLLKTRTQAQIDESGKTVGTYIYESLLCMPNQKIRGKLVRTIERKYYKDELRQILVKQSEFHAALQDHNLLLSCIEELYPNNEAHRRLLSASSFIYFLIEDILFYQRPLKSQKGLIDNCPYESHIYKDKKDGSLHHVPLKCVSKSHPLFQEFRLWQFLSNLRIYQRERMMDGSLKLDVDVTREFLPSEEDYVKLFDWLNERKEISQKFLLAYKPFGLKKNEQANYRWNYVEDKSYPCNETRAEIKSRLSKAGVPEEFLTEEKEEALWHILYSISDKKELTKALGTFAAKNCLNESFVEVFAKIPPFESNYAAYSLKAIRKLLALMRMGKYWNEQAIDRQTRDRIEKILTGEYDETIRSRVREKAMLLTDISSFRGLPLWLACYIVYDRHSESKELVKWETPADIDHFLSKFKQNSLRNPIVEQVITESLRTVRDIWKQEGKIDEIHVELGREMKNPAKERARITAQVQENENTNLRIKALLAEFMNPEFEIENVHPYSPGQQEILRIYEDGVLSGIAEKDLPDDITAILKKFRENDVKKRPTTSEVLRYKLWLEQRYRSPYTGRVIPLGKLFTPAYEIEHVIPQSRYFDDSISNKVICESAVNKLKDNCLGYEFIKKHSGEMVELGNGETVPVFSVEEYERFVKESYFGNSKKMKKLLLEDIPDSFIERQLNDSRYISRVVTSLLSNLVCEEGEQDGLSKNVIVCTGGITDRLKKDWGVQEVWNRIILPRFLRLNEITGRTDFTSTSVNGHLLPALPLYLQKGFNKKRIDHRHHAMDAIVIACANRNIVNYLNNSSARKNSEISRYDLQRLLCEKVKTDANGNYKWILRKPWETFTQDVYAALTNIVVSFKQNLRVINRTTNYYQHYNEAGEKRMIPQTKGDRWAIRKPMHKDTVYGEVNLRKEKTLPLRDVVKNPSIVVDKSLKNKLYELLKSQYDLKAIAKYFETHQDVWADVNLKKIKVYYFTKETNERFFATRKSLDPSFDQKKIEEEVTDTGVQKILLHHLQQNNNDPDMAFSPDGIDRMNQNMTILNDGKWHQPIYKVRTYEKADKFAVGESGNKAKKFVEAAKGTNLFFAVYESVQEDEAIGKQVCKRTFATIPLNEVIKRKKQGLPAAPEDLNGNLPKFVLSPNDLVYLPTEEERNSSRIIQPLDRERIYKMVSSSGSQCFFIKVFVANSIWDKNEYSSLNKMERAITNEMIKEICVPIKIDRLGNVSLIQI

SEQ ID NO: 89 - protein, 1219 aa, Bacteroides cellulosilyticus
MKEEVRGKNRSQTWAILAKFFVWSEKESVWNEKEARTEERVKEYKLVGLKRDTKGNELKLENYRWRVQALSEQLNPEIVAIVLQEINGQISASSGYLGAISDRSKQLYFNRQTVGQYLMSELEKDPNVSLRNRVFYRQDYLDEFDRIWEKQAEFHEELTVELKKEIRDIIIFYQRRLKSQKGLISFCEFEKREVVVEEDGRKKNKTVGCRVIPRSHPLFQEFKIWQTLNDIEVFAWDKQSKRKKADKSSILFDNSEDALLVEGKRFLYQEEKELLAKELFVKESMKKAEVLKLLFENYQELDLNFKQIDGNHTGFALFSAYSKMIEKYGYEPVDFKRSADEIIEKLETIFTNLGWNTELLSIDLSKEDKELERQSYFRLWHLLYSFEGDNTPTGNGKLLEKIMQLCDVEKEYAVELANVSFQEDYGSLSAKAIKKILPYLKEGNQYDVACDYAGYRHSRSSLTKDEIENKILKDKLEILPKNSLRNPVVEKILNQMVNLINTLIDTYGKPDEIRVELARELKKNAKEREELTKSIARNTREHDEIRQLLRTEFGMMNVSRNDIIRYKLYEELKDNGYKTLYSNEYIPREKIFSKEIDIEHVIPQARLFDDSLSNKTLEYRAINIEKGNKTAYDFVKEKYGNDGLEKFLNRCETLFKDKRTKLRKLKMEEKDIPEGFIDRDLRNTQYISKKAFAMLNEISRRVVATTGSITDKLREDWQLVDLMKELNLPKYEKLGMVEMFEDKDGRKIKKITDWTKRNDHRHHAVDALTVAFTKDVFIQFYNNKNAAWMPASKEHANITGIKARYFENGKALAPMPLAQFRAEAKRHLENLLVSIKAKNKVITSNVNRTKNKNGENRKLQQTPRGQLHLETVYGSHRQYATKIEKVNAAFDVTKIATVSKLAYRNALLKRLEAFGNDPKKAFTGKNTLEKNPLYLDENQTEMVPEKVQTVEFETVYTIRKPIDPNLSIDKVVDVKIRSVLEKRLKEYGGDAKKAFVNLDENPIWLNEAKGISIKRVSIRGISNAQSLHEKKDKDGNLILGKEGRKIPVDFVNTGNNHHVAIYKKPVLDKVGQVVLDEEGNPKYELDEVVVSFFDAVTRANLGQPIIDKDYRRSEGWQFLFSMKQNEYFVFPNDKTGFNPKEVDLLNPENYALISPNLFRVQKFAYKNYVFRHHLETTIKDTSSTLKGITWTDFRSSKGLDKIVKVRVDHIGQIVSIGEY

SEQ ID NO: 90 - protein, 1329 aa, Catenibacterium mitsuokai
IVDYCIGLDLGTGSVGWAVVDMNHRLMKRNGKHLWGSRLFSNAETAANRRASRSIRRRYNKRRERIRLLRAILQDMVLEKDPTFFIRLEHTSFLDEEDKAKYLGTDYKDNYNLFIDEDFNDYTYYHKYPTIYHLRKALCESTEKADPRLIYLALHHIVKYRGNFLYEGQKFNMDASNIEDKLSDIFTQFTSFNNIPYEDDEKKNLEILEILKKPLSKKAKVDEVMTLIAPEKDYKSAFKELVTGIAGNKMNVTKMILCEPIKQGDSEIKLKFSDSNYDDQFSEVEKDLGEYVEFVDALHNVYSWVELQTIMGATHTDNASISEAMVSRYNKHHDDLKLLKDCIKNNVPNKYFDMFRNDSEKSKGYYNYINRPSKAPVDEFYKYVKKCIEKVDTPEAKQILNDIELENFLLKQNSRTNGSVPYQMQLDEMIKIIDNQAEYYPILKEKREQLLSILTFRIPYYFGPLNETSEHAWIKRLEGKENQRILPWNYQDIVDVDATAEGFIKRMRSYCTYFPDEEVLPKNSLIVSKYEVYNELNKIRVDDKLLEVDVKNDIYNELFMKNKTVTEKKLKNWLVNNQCCSKDAEIKGFQKENQFSTSLTPWIDFTNIFGKIDQSNFDLIENIIYDLTVFEDKKIMKRRLKKKYALPDDKVKQILKLKYKDWSRLSKKLLDGIVADNRFGSSVTVLDVLEMSRLNLMEIINDKDLGYAQMIEEATSCPEDGKFTYEEVERLAGSPALKRGIWQSLQIVEEITKVMKCRPKYIYIEFERSEEAKERTESKIKKLENVYKDLDEQTKKEYKSVLEELKGFDNTKKISSDSLFLYFTQLGKCMYSGKKLDIDSLDKYQIDHIVPQSLVKDDSFDNRVLVVPSENQRKLDDLVVPFDIRDKMYRFWKLLFDHELISPKKFYSLIKTEYTERDEERFINRQLVETRQITKNVTQIIEDHYSTTKVAAIRANLSHEFRVKNHIYKNRDINDYHHAHDAYIVALIGGFMRDRYPNMHDSKAVYSEYMKMFRKNKNDQKRWKDGFVINSMNYPYEVDGKLIWNPDLINEIKKCFYYKDCYCTTKLDQKSGQLFNLTVLSNDAHADKGVTKAVVPVNKNRSDVHKYGGFSGLQYTIVAIEGQKKKGKKTELVKKISGVPLHLKAASINEKINYIEEKEGLSDVRIIKDNIPVNQMIEMDGGEYLLTSPTEYVNARQLVLNEKQCALIADIYNAIYKQDYDNLDDILMIQLYIELTNKMKVLYPAYRGIAEKFESMNENYVVISKEEKANIIKQMLIVMHRGPQNGNIVYDDFKISDRIGRLKTKNHNLNNIVFISQSPTGIYTKKYKL

SEQ ID NO: 91 - protein, 1152 aa, Roseburia inulinivorans
MNAEHGKEGLLIMEENFQYRIGLDIGITSVGWAVLQNNSQDEPVRITDLGVRIFDVAENPKNGDALAAPRRDARTTRRRLRRRRHRLERIKFLLQENGLIEMDSFMERYYKGNLPDVYQLRYEGLDRKLKDEELAQVLIHIAKHRGFRSTRKAETKEKEGGAVLKATTENQKIMQEKGYRTVGEMLYLDEAFHTECLWNEKGYVLTPRNRPDDYKHTILRSMLVEEVHAIFAAQRAHGNQKATEGLEEAYVEIMTSQRSFDMGPGLQPDGKPSPYAMEGFGDRVGKCTFEKDEYRAPKATYTAELFVALQKINHTKLIDEFGTGRFFSEEERKTIIGLLLSSKELKYGTIRKKLNIDPSLKFNSLNYSAKKEGETEEERVLDTEKAKFASMFWTYEYSKCLKDRTEEMPVGEKADLFDRIGEILTAYKNDDSRSSRLKELGLSGEEIDGLLDLSPAKYQRVSLKAMRKMQPYLEDGLIYDKACEAAGYDFRALNDGNKKHLLKGEEINAIVNDITNPVVKRSVSQTIKVINAIIQKYGSPQAVNIELAREMSKNFQDRTNLEKEMKKRQQENERAKQQIIELGKQNPTGQDILKYRLWNDQGGYCLYSGKKIPLEELFDGGYDIDHILPYSITFDDSYRNKVLVTAQENRQKGNRTPYEYFGADEKRWEDYEASVRLLVRDYKKQQKLLKKNFTEEERKEFKERNLNDTKYITRVVYNMIRQNLELEPFNHPEKKKQVWAVNGAVTSYLRKRWGLMQKDRSTDRHHAMDAVVIACCTDGMIHKISRYMQGRELAYSRNFKFPDEETGEILNRDNFTREQWDEKFGVKVPLPWNSFRDELDIRLLNEDPKNFLLTHADVQRELDYPGWMYGEEESPIEEGRYINYIRPLFVSRMPNHKVTGSAHDATIRSARDYETRGVVITKVPLTDLKLNKDNEIEGYYDKDSDRLLYQALVRQLLLHGNDGKKAFAEDFHKPKADGTEGPVVRKVKIEKKQTSGVMVRGGTGIAANGEMVRIDVFRENGKYYFVPVYTADVVRKVLPNRAATHTKPYSEWRVMDDANFVFSLYSRDLIHVKSKKDIKTNLVNGGLLLQKEIFAYYTGADIATASIAGFANDSNFKFRGLGIQSLEIFEKCQVDILGNISVVRHENRQEFH

SEQ ID NO: 92 - protein, 686 aa, Coprococcus comes
MKKQDSPKNNMGYTAYNLNVLGYEEFAKRVELLFKDTDAVKRLNDSHMQMAEGFDLNALPGSPALRRGVSQAIKVLDDIVSVAGKAPDRIYLKVTRTASNSRKGKRTAKRSDKIKQALKALDADAAADLGAAKLLRELGMFDEKEINERIYLYFHQAGKCLYTGKPIDITRIASNDYYVDHVVPLAYRKDESLDNKVLVYAEASRYKSETLLVSPAVQRKMLPFWRMLRNAGLMSERKLNALIRTEISEGMLKSIIGRQFTENSWEAKLFTAAIAAKYPGTVVIPVKAGVIGAVRSRIGIPKSLKANQFYHAHDALLAAEVGRYMELAKPAFVHNRVKYEQYMRKIKLVNEENKKAPKSQLDFFAGGFFFDRVDKDTGEVYWNKDEEVERIYRACGWKNLRVTYAAFEDGGAFWKQTIYSPREKSKLIATKSDRPAEIYGGYSSQTFANFFVYEVMKKKVKQLRFGAVPAAIASKSDPDTYNAMLEMYARGLAKTAKEKFVRIVRARVLKNTMIELYGERFRIAGEKQVYPVRQMPLAIDEVYLLKGVETIAAAGNAGASAKIDFEKAAESLVGFWDLLLEKLPVNYPKLTVQLKLGLLKHPKDILAATSESEFPAIVYKIAEAEIQVMEQASGLRNMSDTKILGGNTFGGSLVFTFNKVLNDPKSKACFIDTTPAGLYEVKTKIW

SEQ ID NO: 93 - protein, 1105 aa, Actinomyces coleocanis
MDNKNYRIGIDVGLNSIGFCAVEVDQHDTPLGFLNLSVYRHDAGIDPNGKKTNTTRLAMSGVARRTRRLFRKRKRRLAALDRFIEAQGWTLPDHADYKDPYTPWLVRAELAQTPIRDENDLHEKLAIAVRHIARHRGWRSPWVPVRSLHVEQPPSDQYLALKERVEAKTLLQMPEGATPAEMVVALDLSVDVNLRPKNREKTDTRPENKKPGFLGGKLMQSDNANELRKIAKIQGLDDALLRELIELVFAADSPKGASGELVGYDVLPGQHGKRRAEKAHPAFQRYRIASIVSNLRIRHLGSGADERLDVETQKRVFEYLLNAKPTADITWSDVAEEIGVERNLLMGTATQTADGERASAKPPVDVTNVAFATCKIKPLKEWWLNADYEARCVMVSALSHAEKLTEGTAAEVEVAEFLQNLSDEDNEKLDSFSLPIGRAAYSVDSLERLTKRMIENGEDLFEARVNEFGVSEDWRPPAEPIGARVGNPAVDRVLKAVNRYLMAAEAEWGAPLSVNIEHVREGFISKRQAVEIDRENQKRYQRNQAVRSQIADHINATSGVRGSDVTRYLAIQRQNGECLYCGTAITFVNSEMDHIVPRAGLGSTNTRDNLVATCERCNKSKSNKPFAVWAAECGIPGVSVAEALKRVDFWIADGFASSKEHRELQKGVKDRLKRKVSDPEIDNRSMESVAWMARELAHRVQYYFDEKHTGTKVRVFRGSLTSAARKASGFESRVNFIGGNGKTRLDRRHHAMDAATVAMLRNSVAKTLVLRGNIRASERAIGAAETWKSFRGENVADRQIFESWSENMRVLVEKFNLALYNDEVSIFSSLRLQLGNGKAHDDTITKLQMHKVGDAWSLTEIDRASTPALWCALTRQPDFTWKDGLPANEDRTIIVNGTHYGPLDKVGIFGKAAASLLVRGGSVDIGSAIHHARIYRIAGKKPTYGMVRVFAPDLLRYRNEDLFNVELPPQSVSMRYAEPKVREAIREGKAEYLGWLVVGDELLLDLSSETSGQIAELQQDFPGTTHWTVAGFFSPSRLRLRPVYLAQEGLGEDVSEGSKSIIAGQGWRPAVNKVFGSAMPEVIRRDGLGRKRRFSYSGLPVSWQG

SEQ ID NO: 94 - protein, 1361 aa, Anaerococcus tetradius
MGNYYLGLDIGTNSVGWAVTDENYNIERFKKKNMWGIRLFDEAKTAESRRIHRQARRMRQRKIQRLNLLMELFDVEISKVDESFFIRKKESDLHYEDKSQDSRYALFNDKEFNDKDYHNKYPTIFHLIMDLIENDEKKDIRLLYLACHYLIKNRGHFIFEGQKFDVNSSLNNNINKLKSHLDQFYNICLDFDNDKLIEILVNQNLNISEKSKKIKELLRKTNLEVGIANLIAGGSIKLSNMFDDDELKNLDYNSLSFKNSNFDEGRELFEEVLEDRFELVEILKDIHDASVLETMLSSASISPDGGKYISSSMINSYNKHKRDLKLLKKIIKKYKKSEYDNIFRDENIKNNYLSYTRTGINKNKKVQAEDNTDSDGFYKYIVKILKDIKENDSDEDIKYILSEIDKKNFVPKQRTKENSVIPYQLREIELRKIIDNQSKYHKFLNEVDEKGISVKEKIISLLTFRIPYYIGPLNPSYNEEKNFTTSWVKRLAKGKVTPWNFEDMVDIDASREAFIENKLNKCSFLLDETVLPKDSLLYQEYMVLNELNNLKINGQSINTDLKKSIYEELFKKYKKVTRKRLISYIKEKENMSGDIVITGIDGDFKQGLKSYIAFKDIIGEKIDDDIYRKEVEKIIRDISLYGDDKSFIQKKIKNENKLDLSDDQISKIAKLKFKDWGRFSKKLLVGIKASDKNTGEIDNIIGFMRNYNYNIMQLMANVFTFKDEIEKLNSKYYTDEKINIDYLDDLYLSSPAKRMLWQSFQIVDEIKNIKNSDPKKIFIEMARSKEDKPTRKMSRKSRLEKLYTDSKKQFIKLFGPDEYDKLNNEIKNKSESDFRWDNLYLYYTQFGRCMYSLDPIDLEELSNKNLYDQDHIYPKSKIYDDSIENRVLVKKQLNLDKSNEYPIPDRVLNKDKNKLLAFWKMLNEKELIGDKKYARLIRKSPFTDEELGDFIARQLVETRQATKETANMLKRLCPDSKIVYVKAKNVSDFRRKFDILKCRSINDLHHAHDAYLNIVVGNVFDTKFTSNPLNFIKNNSKNRSYNLEKIYDYDVIRNEKIAWLAERKEENQDGSIATVLKNLSKNDIRVTRRTYIKCEDLFDENIVRKGNGKFPIKENNNKSDTNKYGGYSGIKNAYFVLLEDEKHNRILEAIPSFIYKKEKNGEKGSVINYLQNILGIKSAKILRDKIKIGSLLKIDKFPYNLAGKSGNGILISGGVQLILDKNTSKYIKKIENYKYKLDENKDYQINIFDKLSKEENIKLFDLFVDKFENSIYKNRVNIKLKEIKLARPKFEHLSIEEQIKTLTQMLILFGRENNAVNLEYIGLPKNTGKTKINKKINNKDIKIINQSITGLYETEEDLANI

SEQ ID NO: 95 - protein, 1377 aa, Lactobacillus brevis
MESNHDGEQVKYTLGLDIGTSSIGYAAIDKHQKPIRAKGKHVIGVRLFQEGQTAADRRAFRTTRRRLKRRKWRLNLLNRLFDPYLSEVDPNFLPRLRQSNLSPKDDNKHFNGSTLFPDKTDAAFYRQYPTMYHLRYALMTEKRKFDIREVYLAIHHIVKYRGNFLNSATVDSFKTSNIDFTSQFDRLNELYRQVILDEPFQINMDQVDEMTNKLLDNDALKLDTQKQVAKLLPVIYNDKPIDKQYTRIATEFSKAILGYKTKLDVILNLDTQNAKDWVIRLDDEDIDDKLPALVENLDESRQEIVTIIRDLYAQITLNAIVPKGKSLSESMVDKYNDHKDHLDLLMGLIHELGDDSAKGIKLREAYTQYVGKSDDKTLNQDDFYAAIKKNLDEDSKRSPKIQRLIEQASFMPKQRTSANGVIPHQLHQLELDRIIENQGRYYPFLKKPNPNTHKPNGGKYKLDELVAFRIPYYVGPLITKRDQEKTSGADFAWMIRKPGQEGEITPWNFDQKVDRMASANRFIRRMTTKDSYLVAEDVLPDASLIYEKFKALNELNMLKVNDSRLSPSQKQDLFNNLFKKQKTIRTKKLQTYIRTNWELPSVMISGLADPDKFNSSLSTYIDFRDIFGEKVDDPNRQADYEEIIEWSTVFEDRKIYQAKLNQLDWLTEPQRKALLTKRYTGWGRLSKKLLTGLKDQNGDSILDQLWKTNDNFMQIQSRDEFAKQIHDENAKQFHEANNVDDILDDAFTSPQNKKAIRQVDKVVQDVVKAVGYAPDKIAIEFTRSLENNPQRTVSRQRQLQAAYKNIPREIMKSGLMAELGSVADSKKVLSDKLYLYFTQMGKDMYEDKTINIDNLPNYDIDHILPQAFIKDDSIDNRVLISKEENARKSNRVPLKFFGAKRMGFWKDLLNNGLISNRKFQNLTTDPEKISKYSAKGFIHRQLVETSQVIRLVANILGNEYSQAGTTIIEVSAKMNRQLREDFHLIKNRNVNDYHHAMDAYLTAYVGDYLYLRYPKLRPYFVYGDFKKAEDQDLNIRNFNFLHDLKDNESLDKIVDSETGEIVWEKHGSVKQLKKVYHYKFMLVSQEVYTRQDALFNQTIYPASDADKRKLIPIKNSKPVDVYGGYSGNIDAYMAIVRVHGKKEDNYKVVGIPMRAVTKLKKAEKEGHDSYLNAVHEVLKPQFTKKKKNRKTGEITETVDEFDVLLGKVYYRQLIVDGNKKFMLGSSSYQYNAKQLVLSDKAMQVLSKNGKVKSQDENQNLIDVYDEILEKVDQYFELYDQRHYRESLHKGRGIFVNLPLSNQYDGSKLTSYGKYETIDAILNGLHANATMSNLRYLGISSPFGKMQASNGLTIDPDSIICYQSPTGLFERQIKLSDL

SEQ ID NO: 96 - protein, 1239 aa, Lactobacillus buchneri
MTEKRKFDIREVYLAIHHIVKYRGNFLNSATVDSFKTSNIDFTSQFDRLNELYRQVILEEPFQINMNQVDKMTNKLLDNDALKLDTQKQVAKLLPVIYNDKPVDKQYTRLATEFSKAILGYKTKLDVILNLDTQNAKDWAIRLDDEDIDDKLPALVENLDESRQEIVTIIRDLYAQITLNAIVPKGKSLSESMVDKYNDHKDHLDLLMGLIHELGDDSAKGIKLREAYTQYVGKSGDKTLNQDDFYAAIKKNLDEDSKRSPKIQRLIEQASFMPKQRTSANGVIPHQLHQLELDRIIENQGRYYPFLKEPNSNTHKPNGGKYKLDELVAFRIPYYVGPLITKQDQEKTSGADFAWMIRKPGQGGEITPWNFDQEVDRMASANTFIRRMTTKDSYLVAEDVLPDSSLIYEKFKVLNELNMLKVNDRRLSISQKQDLFNNLFKKQKTIRTKKLQTYIRTKWELPSVMISGLSDPDKFNSSLATYIDFRDVFGEKVDDPNRQADYEKIIEWSTVFEDRKIYQAKLNQLDWLTESQSKALLTKHYTGWGRLSKKLLTGLKDQNGDSILDQLWKTNDNFMQIQSRDEFAKQIHDENAKQFHEANNVDDILDDAFTSPQNKKAIRQVDKVVQDVVKAVGYAPDKIAIEFTRSPQDRPQRTFSRQRQLQSTYLNVAKALMKSNLNQELKSVIDSQQTLTDKLYLYFTQLGQDMYTGKEINFDELVNYQIDHILPQAFIKDDSLDNRVLVSAPINNAKSDNVPVKKFGAKMGYFWKQLAENHLISKRKLNNLTTDPDKIGKFTAQGFIHRQLVETSQVIRLVANILGNEYGHDGTTIIEVTAKMNHQMRKDFDLIKIRDVNDYHHAMDAYLTAYVGDYLYLRYPKLRSYFVYGDFKKLKDQSLKIRNFNFLHDLTNDEAGDKIVDQETGEIIWDKHESVKQLKKVYHYKFMLVSQEVYTRQDALFNQTIYPASDADKRKLIPIKNNKPVDVYGGYSGNVDAYMAIVRIHGKKEDKYKVVGVPMRAVADLKKAESKGRDNYLNAVHEVLKPQFTKKKKDRKTGEITEMMDDFDVLLGKVYYRQLIVDGNKKFMLGSSTYQYNAKQLVLSDKAMQVLSKDDKLKNQDENQNLIDVYDEILEKVDQYFELYDINKFRQKLHDGRKKFIELPVDNDFNGKKLISYGKRATIISILNGLHANATMSNLKYLGISSPFGMLQVPNGIILSPASRICYQSPTGLFERKVKLSDL

SEQ ID NO: 97 - protein, 1381 aa, Lactobacillus fermentum
MDYVKEYHIGLDIGTSSIGWAVTDSQFKLMRIKGKTAIGVRLFEEGKTAAERRTFRTTRRRLKRRKWRLHYLDKIFAPHLQEVDENFLRRLKQSNIHPEDPAKNQAFIGKLLFPDLLKKNERGYPTLIKMRDELPVEQRAHYPVTNIYKLREAMINEDRQFDLREVYLAVHHIVKYRGHFLNNASVDKFKVGRIDFDKSFNVLNEAYEELQNGEGSFTIEPSKVEKIGQLLLDTKMRKLDRQKAVAKLLEVKVADKEETKRNKQIATAMSKLVLGYKADFATVAMANGNEWKIDLSSETSEDEIEKFREELSDAQNDILTEITSLFSQIMLNAIVPNGMSISESMMDRYWTHERQLAEVKEYLATQPASARKEFDQVYNKYIGQVPKEKGFDLEKGLKKILSKKENWKEIDELLKAGDFLPKQRTSANGVIPHQMHQQELDRIIEKQAKYYPWLATENPATGERDRHQAKYELDQLVSFRIPYYVGPLVTPEVQKATSGAKFAWAKRKEDGEITPWNLWDKIDRAESAEAFIKRMTVKDTYLLNEDVLPANSLLYQKYNVLNELNNVRVNGRRLSVGIKQDIYTELFKKKKTVKAGDVASLVMAKTRGVNKPSVEGLSDPKKFNSNLATYLDLKSIMGDKVDDNRYQMDLENIIEWRSVFEDGEIFADKLTEVEWLTDEQRSALVKKRYKGWGRLSKKLLTGIVDENGQRIIDLMWNTDQNFMQIVNQPVFKEQIDQLNQKAITNDGMTLRERVESVLDDAYTSPQNKKAIWQVVRVVEDIVKAVGNAPKSISIEFARNEGNKGEITRSRRTQLQKLFEDQAHELVKDTSLTEELEKAPDLSDRYYFYFTQGGKDMYTGDPINFDEISTKYDIDHILPQSFVKDDSLDNRVLVSRAENNKKSDRVPAKLYAAKMKPYWNQLLKQGLITQRKFENLTMDVDQNIKYRSLGFVKRQLVETRQVIKLTANILGSMYQEAGTDIIETRAGLTKQLREEFDLPKVREVNDYHHAVDAYLTTFAGQYLNRRYPKLRSFFVYGEYMKFKHGSDLKLRNFNFFHELMEGDKSQGKVVDQQTGELITTRDEVAKSFDRLLNMKYMLVSKEVHDRSDQLYGATIVTAKESGKLTSPIEIKKNRPVDLYGAYTNGTSAFMTIIKFTGNKPKYKVIGVPTTSAVGLKRVGKPGSESYNQELHRIIKSNPKVKKDFEIVVPHVSYSQLIVDGDCKFTLASDTYQHPATQLVLSKESMEIIADDFKFVKENPATADEQLVRVFDEIVNQMNHYFTIFDQRSNRQKVTKARDKFVSLPTESEYEGAKKTQVGKTEVITNLLMGLHANAAQGDLKVLGLSTFGFFQSSGGLNLSEDAMIVYQSPTGLFERRICLKDI

SEQ ID NO: 98 - protein, 1306 aa, Sphingobacterium spiritivorum
MKHILGLDLGTNSIGWALIKQNFENKQGEILGMGSRIIPMGAELSKFEQGQAQTKNANRRIARGTRKLNKRYKQRRNKLIYILQGLGMLPDQIKLVNQFSDPNKLDKISILPISKNQQQLTAFDLLELRVKALTEKIELEELGKVIYKYNQLRGYSGGNSEPEKEENNEDESEENEKTNDSFVVFSKVLSLGLPEEITFKGKKLSKRKIAIETEDGIIEAETFLDSLKENDSLELHVNIRRAKSGDTITIKLPSKTSWRKKMENIEKQLADKSKELGREYFISELLFDILKENKWAKIRNNVILRSRYESEFDAVWSEQSKYYPILNHLETDRLQKILEFIFPGQKESQEKLRQTGLKEGLKYVIKNQVVFYQRELKDQSDLISNCRYEPTEKVVAKSHPVFQEYKIWEQINKLVINTKIENGVNRKGEIRYKYIDKPIPVALKEWLYEELQSKKEVSFNPILTKLKKEFKLRENVDFLNGMNAKDKLKGNETKVILQKALGELWNIFGLDDSERQVELWEILYNGKGNEYDLTSERTSNILAFIEKYSPDLENKNDVAIKISKIKFSRNYSNLSLKAIDNILPLVRAGKFFDQNFSEALSHKIVKLLNENVEDPFEKSAQEFLDKNQDVLSDGGIVNAIATILVYDKHTAKEYSGDELIKEFTQISRLKQGELRNPLAEQIINEALVIVRDIWRKYGFKPDEIRVELARELKNNAVERGKMYSANLKSQKHNAEIRNKLIELKQEISIANIEKYKLWVSQENLQEVYLKNYNDPSKSEIEKLKLWESQGHISPYTGQPISLSELFNRERYDVDHIIPQSRYFDDSLSNKVICEKSINNEKGNRTSMEYFEVGSVNYRIFTKDQFIDHANKYFSGKKRKNLLATSIPEDPIQRQIKDTQYISIRIREELNKIVGNENVKTTTGGITDYLRNHWGLTDKFKVLLKERYEAVLPKIAQLEYDNYKKETEKKFTEYKNADVEFNEPILDEEIFIEKFRSEFIRKKNNKLIIKGWSKRIDHRHHAMDALVIACTQPAHIKRLNDLNQVLKEWLDKNKEKFFPGFSGTKTELLDEVLNLEEEKRREIFNQLEKFRAIEMPWKGFPEEAEQKLKEVIVSHKPKDKLLLQYDIQGNKQIKLRGQLHEGTLYGLSNGKEIYRIPINKLAGKQFATEKTIEKIVNPFLKNVIEEHLKSFGKKEEAFSAEGILDLNKKLAERKDEQQNPKPHPPISTIKIYYKDPSKSKKKKTDDEDDISLQKLNRKKSFNDSLYVKTGDNYLFAVMEKEVFNKKLNKDKTERHYDLKLFLTLLIF

SEQ ID NO: 99 - protein, 1358 aa, Acidaminococcus sp.
MGKMYYLGLDIGTNSVGYAVTDPSYHLLKFKGEPMWGAHVFAAGNQSAERRSFRTSRRRLDRRQQRVKLVQEIFAPVISPIDPRFFIRLHESALWRDDVAETDKHIFFNDPTYTDKEYYSDYPTIHHLIVDLMESSEKHDPRLVYLAVAWLVAHRGHFLNEVDKDNIGDVLSFDAFYPEFLAFLSDNGVSPWVCESKALQATLLSRNSVNDKYKALKSLIFGSQKPEDNFDANISEDGLIQLLAGKKVKVNKLFPQESNDASFTLNDKEDAIEEILGTLTPDECEWIAHIRRLFDWAIMKHALKDGRTISESKVKLYEQHHHDLTQLKYFVKTYLAKEYDDIFRNVDSETTKNYVAYSYHVKEVKGTLPKNKATQEEFCKYVLGKVKNIECSEADKVDFDEMIQRLTDNSFMPKQVSGENRVIPYQLYYYELKTILNKAASYLPFLTQCGKDAISNQDKLLSIMTFRIPYFVGPLRKDNSEHAWLERKAGKIYPWNFNDKVDLDKSEEAFIRRMTNTCTYYPGEDVLPLDSLIYEKFMILNEINNIRIDGYPISVDVKQQVFGLFEKKRRVTVKDIQNLLLSLGALDKHGKLTGIDTTIHSNYNTYHHFKSLMERGVLTRDDVERIVERMTYSDDTKRVRLWLNNNYGTLTADDVKHISRLRKHDFGRLSKMFLTGLKGVHKETGERASILDFMWNTNDNLMQLLSECYTFSDEITKLQEAYYAKAQLSLNDFLDSMYISNAVKRPIYRTLAVVNDIRKACGTAPKRIFIEMARDGESKKKRSVTRREQIKNLYRSIRKDFQQEVDFLEKILENKSDGQLQSDALYLYFAQLGRDMYTGDPIKLEHIKDQSFYNIDHIYPQSMVKDDSLDNKVLVQSEINGEKSSRYPLDAAIRNKMKPLWDAYYNHGLISLKKYQRLTRSTPFTDDEKWDFINRQLVETRQSTKALAILLKRKFPDTEIVYSKAGLSSDFRHEFGLVKSRNINDLHHAKDAFLAIVTGNVYHERFNRRWFMVNQPYSVKTKTLFTHSIKNGNFVAWNGEEDLGRIVKMLKQNKNTIHFTRFSFDRKEGLFDIQPLKASTGLVPRKAGLDVVKYGGYDKSTAAYYLLVRFTLEDKKTQHKLMMIPVEGLYKARIDHDKEFLTDYAQTTISEILQKDKQKVINIMFPMGTRHIKLNSMISIDGFYLSIGGKSSKGKSVLCHAMVPLIVPHKIECYIKAMESFARKFKENNKLRIVEKFDKITVEDNLNLYELFLQKLQHNPYNKFFSTQFDVLTNGRSTFTKLSPEEQVQTLLNILSIFKTCRSSGCDLKSINGSAQAARIMISADLTGLSKKYSDIRLVEQSASGLFVSKSQNLLEYL

SEQ ID NO: 100 - protein, 653 aa, Oribacterium sinus
MELINSEEFTFKEELEKHTQVAMKQLSEFTYEDLEDSYFSVPVKRMIWQTLLVVREIEKVMGYAPKRIFVEMTRTEEEKGDKGRKESRGNQLLELYKSIKNTDSHNWKEEIAAADKDGKLRSKKLFLYYMQMGRDMYTGEEIDLGRLYDDNLYDIDHIYPRHYVKDDSIMNNLVLVNRRANQDIKKDLYPIPEQIKANPNVHMLWDALHKQKLITDEKYARLTSNTAFSEKQLGDFIARQLVETGQGTKGVADLLEQLFKDTVIVYAKASNVSDFRRDNGFLKSRLVNDFHHAQDAYLNIVVGNVYYTKFTKNPWNFICKDYEKDKEKNRYNLARMFDWNVVRGSETAWIVERKDEKGTISTVRKMMQKNTPLLTRMNFEQHGSIANATLYSAKKAKSENYLPLKTADEKMSDVKKYGGYTSMSIAYYFIVHHKEDKKENVTIEALPLYCKDKVEREENGLEKYCEEVLGYGEVNIIRRKLKIQSLLEFNGYQVHLSGKTGNQLILRNAISLCLSTKWITYIKKLEKAVNIQIVEEVVTPEENIKLYNLLADKHANTVYSKRPNAYGEKLLADREIFVTLEFGKQCEALLQILSLTKIGSTEANLLLIGESEHSGKILISKNLKASDRPAVINQSPCGLYEKKEWIFDKIVEK

SEQ ID NO: 101 - protein, 1436 aa, Capnocytophaga gingivalis
MKYIKYILGLDIGSNSIGWALIQLDLLQKTKRIIAAGSRIIPMDQKVLSDFGKGITISPTAQRTSYRNARHCRERHLLRRERLHRVLHILGFLPTHYDKQIDFSKRYGKFVDNTEPKIAYNEGKFLFMDSFQEMLSDFKSHQPDLFYTKKNGEESKIPYDWTIYYLRKKALSQKISKEELAWIILNFNQKRGYYQLREEEGNKENDFEIISSKIISVIKKDKDKKYNKYWYDIILENGLVYQAAFYNDFVYNWINQDREFIIERTSLKNGAEKVKLSYLPTFDEIDKMDKKEQDKYYKKIKIKTENSIGNKTVGCYIYDHILQNPNEKIKGKLVRTIERKYYKEELKAILEKQIALQPELFTDQLLADCIRELYSKNEAQQRNLAARDFVHLLVEDIIFYQRPLRRQKSTLANCSLESRSYIDKDSHTRKEAPLKVCPKSNPYYQEFRVLQWLQNLKIYEIDSDQEVTHQFIKTLEDKQQLFEFLMAQKEIDCEELLKYFLNQTYPNAKEKALKSELKKWKDTYRWNYVYDIGEKSSKKYPMNETRYELKRHLEKVANLPDDFLSSEVEYLLWHLIYSVKDKVAYEKGLKKFAQKHHLDKDSFVESFKKFNPYPSEYGSFSEKAIRKLLPLMRFGAHWDFNHIDKNTQKRIEDLITGVENEEIRTILREKAEKYQLEKETDFQDLPLWLAQYIVYNRHAEASSLEKWTSVNDLETYLNEFKQHSLRNPIVEQVVMETLRVVRDIWQQYGQGQASFFNEIHIELGRELKKTAKEREKLSKQNQKNEDINLSIKEKLKELEKYNTRAYSITHQEKYKLWLEQKHISPYTGQIISPENLFTDNYEIEHIIPQSRFFDDSLSNKVVCESIVNKAPYKDRQLGLEFIKNQGGRIVKELSKENKTIKIFTEEQYRTFIKEHYSNNPEKTKKLLLEEIPEKMVARQMNDTCYISKFISEILSKIVRSDEQDEGVHSKNVILCTGKITSILRQDWGLNDIWDNLILPRFERMNNLLQKEKFTIYSIEKQKKIPVVPINDQFKSFQKKRIDHRHHAMDAIIIACTTREHINYINNQHALEKEKDKKEKQEERDKLREKLCIKKYNNRSEGNYSWIFKKPWDTFTQEVRVALEDIVVSFKQNLRVINKATNYYERWVEENGKYIKKMVKQEGTNWAIRKPLHEETISGKIYLDREKITKNDILTATRKTVDSSFDDKRIKKITDTGIQKILLNYLKYKGSPEIAFSPEGLEELNKNLSIYNDGKPHKPIYKVRIYEKGSGRFALGEKGRKYKKYVQGASNLYFGIYQGAKRSFATIPLNEVIERQKQGLPSVPEYNEKGDLLLFSLSPNDLVYVPIEGEIIENIDFRNLSKEQKERIYNVNDFSSTCYFTPNRIAKAIFPKEVDLQRKGDKLSGSYDTKTASLEGIQIKEVCIKLKVDRLGNISKA

SEQ ID NO: 102 - protein, 1069 aa, Bacillus cereus
MNYDIGLRIGITSCGWSIINKDLERIEDLGVRVFEKAENPDGTASAAPRREARKSRRKHRRKKHRIERIKRLIVQHDLLSKKELDSLYLSPFNIDVWNLQVEALERKLDNREFARVLIHLVQRRGFQTIRKSVEIQEEGKLLENVSENERIMKVNGYKTVGEMFSKHEKFTHHKRNKDGSYTSVVTRSLLLKEIKTIFNSQRILGNVFSTQKLESDYLYIWGSQRPTLTYEQLMSMVGNCIYEKKEKRAPKTSWAFQYFSLLQKINKLKVSDDNTLRKLSKEERDIVIELAFKKKNVSFVDIRKALKLNDNTKFNHLTYSHVVETKKVEKATFIELKGYHLIKKQLKDRNVELTQELQPKDYDAIAAASTFFKNDIEFRDYLRNQYLDSNGKRKSNIANKVFEDKVIAAVFELNFSKVCHLSFKSLYKLIPHLEKGLDYKEAILCAGYNFRDENKRDKKLFLPVIQQETNPVVHRALTQARKVINAIIREYGSPNTIRFVVANDLAKTYKQRKELESTLKKNRAENEKIKTKLLSMGIINPTGMDIVKYKLWYEQSGICLYTGRQMELSSLFKPGYSIVNHIIPYNRSFDDTYHNRVLTLTETKYEKGNKIPFEYFGAEETCWNEYEKRVSTSKKIHDKKREKLLIRNFDIEYENEMISNNVFDTHYIGSYFEKYIDEHLQFKKSTKKQKVFSIHGNMVAHLHSRWGFNKNSREIYLNHAVDAAIVAVLTDQLIRNIADYYRRDNILEQKGSLKFPEPWKSFSIELEARISPQVRDLIKKLNLDSYLDVDILHIKPVFISKKPRRKVNGEAHKSTIRSLIGINEIGKTVTCIKTRLEDIPFDENGDFPMYGKDTDKYTYTAIKERYLEFNKDKEKAFSTPLYKLKRNGEPGNQIKSVKIIDTRNIVNKVNQGKGIAYNSNIIRVDVFSRDQKYYVVPIYLRDFIKGSLPNKIITAAKGFMQWPETDNSYTFLFSIFPNDLIKVVPKEGKFIKAKNENKENINLTEILGYFKGLDSSTGAFTLESHDGSLLARGIGTKNLLLIEKYQVDVLGRYNKVGNEERQDIKIQQN

SEQ ID NO: 103 - protein, 1391 aa, Lactobacillus jensenii
MKEIKDYIIGLDIGTNSCGYVVTDKQNNILKLKGKTAIGARLFKEGEAAADRRAFRTTRRRLARRRWRLSLLEEIFDEEMNKVDPSFFRRLKESDYSPKDRRKQFNSIVFESSEADKAFYEKYPTIYHLRNALMHDNQKHDLREIFLAVHHIVKYRGNFLREDSVKAFKAAKFTLQGEDGIGPVDKLNDLLKEIYIEAAPELATDNLSKIEDIIKDKKLYKQDKLKQIANLLPKAVDSKDKAKLNKDIAKQVANALMGYMFRLDTLFSFTDVDVKDYKLKFSDANIDESLDALTSLLTDAQIEFVLELQSIYNTIVLNEIVPDGMSLSESMVKKYDDHKKDLKLYKEYIDSLSDQKKAKQLEAAYALYVNYRKADLLAAKKLFEKKKIGDKKFVDVISNFEVFGKFVSDNLDDSELANKIKARLDLGEFLPKQRTNQNGVIPYQLHQVELTQILEKQGKYYPFLITPNPVESHRNNAPYEISELVSFRVPYYVGPLIDNQSIKDKQNKNKFAWMVRQKQGQITPWNFEEMVDTTESANQFIKRMTRKDTYLLAEDVLPKSSLIYQKFMILDELNRIKIDGKKLTSKLKHDIFEKLFKKQKSINLDNLKNYLLAEGNIPGLIEGLSDGINFNNSFSTYIDYRNIFGDEIDNPNKQADFEKMIEWSTVFEDRKIFKRKLKEITWLTPEQIKQVSSKRYSGWGRLSKKLLTQITDENGVNILQRLWNEPETLTEVLANPVIKRKISEANSLFVQINKVENILDDAYTSPQNKKAIRQVIRVVDDIIAAAHGKKPSQIAIEFARSSQNKAKVPDTRKKQLDKIYNKISSEILDSSIKNELKNLKSNKYLSKDKLFLYFKQMGRDAYTGDKLSLDQLQNYDIDHIFPRSFIKDDSLDNRVLTQKPINAKKSDYGIPALEFGNKYVPDLGITVKEMWKLWQENGLISKSKLINLCTNPKKIGSKRASGFINRQLVETSQVIKLVAIILQAEFPDTEIIEVKALQNTTLRESFHLYKNRSVNDYHHAIDAYLTTIVGNYLYQVYPKLRPYFVYGQFKKFNQEKNIDILKRLKNFNFLRQLIFNTDDNIYISGTKEIVFNKKDIIHKLETAYGYKYMNISRECYQETSSLFNQTLYAHNSSVKNSLIPKKKGLPTEIYGGYSGNKDSFFVLVKIVKKRTNLYRIVGIPTRELAKLNSSNNYNQALNKIVESKLCLKETESFKILIKRLLYGTLIVDNGQKFRIGSFKEKHNVQQLVLQLKSMKYIKFYIDGGQNYFTDVERKKLEKQDRDKCLLYVFDDIMNVVNKRFTLFDMSKYEKDGDSLREKFNCLDFNDKVSILSDLLKAFHANSDRTSITKLKITNLGRHQAGKNGITLTTNAQIIYQSPTGLFERRIKIKDL

SEQ ID NO: 104 - protein, 1114 aa, Eubacterium rectale
MNYTEKEKLFMKYILALDIGIASVGWAILDKESETVIEAGSNIFPEASAADNQLRRDMRGAKRNNRRLKTRINDFIKLWENNNLSIPQFKSTEIVGLKVRAITEEITLDELYLILYSYLKHRGISYLEDALDDTVSGSSAYANGLKLNAKELETHYPCEIQQERLNTIGKYRGQSQIINENGEVLDLSNVFTIGAYRKEIQRVFEIQKKYHPELTDEFCDGYMLIFNRKRKYYEGPGNEKSRTDYGRFTTKLDANGNYITEDNIFEKLIGKCSVYPDELRAAAASYTAQEYNVLNDLNNLTINGRKLEENEKHEIVERIKSSNTINMRKIISDCMGENIDDFAGARIDKSGKEIFHKFEVYNKMRKALLEIGIDISNYSREELDEIGYIMTINTDKEAMMEAFQKSWIDLSDDVKQCLINMRKTNGALFNKWQSFSLKIMNELIPEMYAQPKEQMTLLTEMGVTKGTQEEFAGLKYIPVDVVSEDIFNPVVRRSVRISFKILNAVLKKYKALDTIVIEMPRDRNSEEQKKRINDSQKLNEKEMEYIEKKLAVTYGIKLSPSDFSSQKQLSLKLKLWNEQDGICLYSGKTIDPNDIINNPQLFEIDHIIPRSISFDDARSNKVLVYRSENQKKGNQTPYYYLTHSHSEWSFEQYKATVMNLSKKKEYAISRKKIQNLLYSEDITKMDVLKGFINRNINDTSYASRLVLNTIQNFFMANEADTKVKVIKGSYTHQMRCNLKLDKNRDESYSHHAVDAMLIGYSELGYEAYHKLQGEFIDFETGEILRKDMWDENMSDEVYADYLYGKKWANIRNEVVKAEKNVKYWHYVMRKSNRGLCNQTIRGTREYDGKQYKINKLDIRTKEGIKVFAKLAFSKKDSDRERLLVYLNDRRTFDDLCKIYEDYSDAANPFVQYEKETGDIIRKYSKKHNGPRIDKLKYKDGEVGACIDISHKYGFEKGSKKVILESLVPYRMDVYYKEENHSYYLVGVKQSDIKFEKGRNVIDEEAYARILVNEKMIQPGQSRADLENLGFKFKLSFYKNDIIEYEKDGKIYTERLVSRTMPKQRNYIETKPIDKAKFEKQNLVGLGKTKFIKKYRYDILGNKYSCSEEKFTSFC

SEQ ID NO: 105 - protein, 1362 aa, Lactobacillus paracasei
MTKLGKPYGIGVDIGSNSIGFAAVDENSHLIRLKGKTVIGARLFEEGKAAAKRRAGRTTRRRLSRNRWRLSFLRDFFESHITPTDPNFFMRQKYSEISPKDKARYKYEKRLFNDRTDAEFYQQYSTMYHLRNRLMTDPSRADVREIYFAIHHILKSRGHFLTPGDAKDFNTNDVALDEIFPALQDAYAQVYPDLGITFDEDKANEFKTILLNEIATSIDTQRALVKLLLAEEDDKDILKQQKQVLTEFAKAVVGLKTKLNLALGTEVDSSEATAWNFSLGQLDDKWAGIESAMTDEGTEILDQIRDLYRARLLNGIVPTGKTLSQAKVDDYTQHHEDLQLFKAYLKQLEDDGTAKAIRQLYDRYIDGDDAAPFLRENFVKALTKDVTAHPNTKSPELLERLAQPDFMLKQRNKANGAIPVQMQQRELDQIIKNQAVYYDWLAAPNPVEKHRKSMPYQLDELLNFRIPYYVGPLVTAKEQKAAQGGVFAWMVRKDPEGNITPYNFDEKVDREASANTFIQRMKTTDTYLIGEDVLPKQSLLYQRYEVLNELNNVRVNNEKLSIEQKQQVIRELFERHNSVTIKQFAENLRAHGDYAHIPEIRGLADEKRFLSSLSTYRQLKSLLPEAIDDPAKQADIENIIAWSTVFEDAAIFKTKLKEISWLGSEAITKLSNIRYRGWGQFSRKFLNGLTLGNGHTIIQELLLSTNNLMQILTDETLQKKMTELNADKLKTANINDAIDNAYTSPSNKKALRQVLRVVDDIKRAADGQDPSWLYVETADGGGTPGKRTRARQHQLQEIYANAAHELIDTAVRGELEDKISDKADFNDRLVLYFMQGGRDIYTGAPLNIDQLSSYDIDHILPQSLIKDNSLDNRVLVHAIINREKNATFASTIYAQKMNATWRQWHEAGLISGRKLRNLQMRPDQIDKYASGFVARQLVETRQIIKLTEQIVAAQYPDTKIIAVKAGLSHQLREELEFPKNRDVNHYHHAFDAFLAARIGTYLLKRFPNLQAFFTYGKFTKADVKKLRGFNFIRDITHAEDKIVAKDTGEVVWDKQRDVDELDRIYNFKRMLITHEVRFETADLFKQTVYGARDSKEAGGSKQLIPKKKGYPVDIYGGYFRENTAYLAVVKVTKKTETIFKVVKIATSQVAALNKARSRSTAEELSVLTELLKPKFSKVGKNGKITDTPFEVVLPRVPREQLFYNAKYGFFMVNSDTMFHNFQEIWVSRSDQKILQQIRKAKIDYPNVDQDLDNLFHNLADQIVKYFDLYSIAGFKEKISQSQNTFNDLAVDDTDQSVGKITVINELLKGAQANGMTGSLKVLKISTPFGFTQDKSGVLTKDSSIIYQSPTGLFERSVRLTDL

SEQ ID NO: 106 - protein, 1056 aa, Actinobacillus minor
MKALNYILGLDLGIASVGWAVVEIDQNELPIRLIDLGVRTFERAEVPKTGDSLALARRLARSSRRLVRRRAVRLLKAKRLLKQEGILQADDFHSSHLKPLPNNPWELRVKGLNHLLDRKEWAAVLLHLLKHRGYLSQRKNESKTDNKELGALLKGVSENRQLLQAQAFSTPAEIAIKKFQQEEGHIRNQRGAYSHTFDRNDLLAELRLLFQKQREFNNPYTSQSLEQAIAELLMWQKPALSGEAILKMLGKCTFEPSEYKAPKNSYSAEYFVWLTKLNNLRILENGADRGLTAEERQLLINQPFEKAKFTYAQARKLLELSDLAIFKGVRYGKDNAESATLMEMKAWHAIRKALESNGLKTEWNGLKTKPELLDKIGTAFSIYKTDEDISQYLNGELSPAVLNALLENLSFDKFIRLSLQSLAKILPLMEQGLRYDEACKQVYGDHYGKKEQLELRFLPKIPVEDIRNPVVLRTLSQARKVINGVVRLYGSPARIHIETGREVGKSFSERRDISKRQEENRNERQRAVEKFKEFFPHFVGEPKAKDILKMRLYEQQHGKCLYSGKELDLNRLLEKGYVEIDHALPFSRTWDDSFNNKVLVLASENQNKGNQTPYEWLNGKENAERWKLFQALVNGSRFPYSKKQRILTKYLDEDGFRERNLNDTRYVARFLCNFIEDNMQLVGQGKKRVFASNGQITALLRRSWGIQKVREDNDRHHAVDAVVVACSTRALQKKITDYVRYKEMNVFTGEKIDQETGEIIKFHFPEPWKFFRQEVEIRVFSETPAEDVVIALPDRPQANHEFIQPLFVSRAPTRKMTGQGHMETIKSAKRLAEGLSVSRVPLTQLKLKDLENMVNREREKALYEALKVRLEKFNNDPAKAFADPFYKKGGQQVKAVRVEQVQKSGVLVRQENGVADNASMVRVDVFIKGGKYFLVPIYTWQVAKGILPNRAATQGKEEEYWDIMDETAIFQFSLYQNDLIKLVTKKKTIFGYFNGLNRATSNINIKEHDLDKSKGKDGIYLEVGVKLALSLEKYQVDELGKNIQPCRSMKKRPPVR

SEQ ID NO: 107 - protein, 1081 aa, Neisseria flavescens
MTAFKPNPINYILGLDIGIASVGWAMVEIDEEENPIRLIDLGVRVFERAEVPKTGDSLAAARRLARSVRRLTRRRAHRLLRARRLLKREGVLQAADFDENGLIKSLPNTPWQLRAAALDRKLTPLEWSAVLLHLIKHRGYLSQRKNEGETADKELGALLKGVADNAHALQTGDFRTPAELAVNKFEKESGHIRNQRGDYSHTFSRKDLQAELVLLFEKQKEFGNPHISDGLKEGIETLLMAQRPALSGDAVQKMLGYCTFEPTEPKAAKNTYTAERFIWLTKLNNLRILEQGSERPLTDTERATLIDMPYKNKLTYAKARELLGLDDTAFFKGLRYGKDNAESATLMEMKAYHAIRRALEKEGLKDKKSPLSLSPELQDEIGTAFSLFKTDEDITGRLKGCLQPEILDALLKHINFDKFVQISLKALRRIVPLMEQGKRYDEACAETYGDHYGEKNSEEMLYLPPIPADEIRNPVVLRALSQARKVINGVVRRYGSPARIHIETAREVGKSFKDRKEIEKRQEENRKDREKAAAKFREYFPNFVGEPKSKDILKLRLYEQQHGKCLYSGKAIDIRRLNGKGYVEIDHALPFSRTWDDSFNNKVLVLGSENQNKGNRTPYEYLNGKDNSREWLEFKARVETSRFPHSKKQRVLLQKFDEKGFKERNLNDTRYVNRFLCQFVADHMQLTGKGKRRVFASNGQITNLLRGFWGLHKVRAENDRHHALDAVVVACSTVAMQQKITCFVRYKEMNAFDGKTVDKETGEVLHQKTHFPQPWEFFAQEVMIRVFGKPDGKPEFEEADTPEKLRALLAEKLSSRPEAVHEYVTPLFVSRAPNRKMSGAHKDTLRSAKRFVKHNEKISVKRVWLTEIKLADLENMVNYKNGREIELYEALKARLGAYGGNAKQAFDPKDNPFYKKGGQLVKAVRVEKTQESGVLLNKKNAYTIADNGDMVRVDVFCKVDKKGKNQYFIVPIYAWQVAENILPDIDCKGYRIDDSYTFCFSLHKYDLIAFQKDEKSKVEFAYYINCDSSNGRFYLAWHDKGSKEQQFRISTQNLVLMQKYQIDELGKEIRPCRLKKRPPVR

SEQ ID NO: 108 - protein, 1392 aa, Gemella haemolysans
MANKTWYLGLDIGSASVGWAATDTGYKIIRKNKKRLWGVRLFEEAKTAEDRRGYRSSRRRLARRKWRLNLLEELFTSEVKKVDENFFLRLKESQYHYEDKTHKVPYAIFNDKDYTDKDYYKDYPTIYHLRSKLMTEENPDIRKVFLAIHHIIKNRGHFLLQGQSFKDGNLNNLIKELLELDILHVGFEVTEEVVDKIADISLEKKTSKDKLNDIKELYPKEKQLLEVFRLIFGGKTSLDKLFAIDEYKELDAAIKSVSFKEKIYEEVRHDYEQVLSNYIELLDLAKLVYDSIILSDIKKEGKTLSESKVELFEKHRDDLLKLKNLVKNDSKLSEDKKVELYALIFKEDKDKGTNYVNYIRKSEEGKGCNYEDFKKFLVKELAKLEESSVKTEIIKDLELEQFLPLQRTKDNSVVPYQIHKEELVKILDNAARYHSFLNEKDESGYNVREKVIQLLEFRIPYYVGPLNSSKKAKEGGFAWSVRNTGYENTPVTPWNYSKVIDESASAEKFITNLTNKCTYLKGEDVLPKSSLLYSEFALLNELNALKYDGNRISLEARNTIIEKLFKQQGKKVTKTSIKNLLKAEGYIDGKGEITGIDITVKNDLKSYRDFKKILGNKFNSEHVENIILWITLYGESRKLIKAKIESVYGEVYSKDEITKMSRLVYKDWGRFSRKLLTELVSKKLYNEETGECLNIIGAMRQNNILFMELLADRFDYSKQIVEFNKELQEDVTEIAPEILDDLYVSPAVKRSIWQTVRIVEELKKIIGCAPAKIFVETTRSNQEKKKPTDSRKKQLELAYKAVKKDVKELEKEIGTINFDVLNDRLSSVEPSKLKAKKLYLYYTQLGRCMYSEEPINISELFDNNKYDIDHIYPQSKIKDDSFTNTVLVKRESNAAKTDRYPLGSDIQTPSNRRFWKFLKEKGLISDEKYNRLVRTEEFSDEELSGFIARQLVETSQSVKAVASILGELNPETSICYSKAENVSSFRQNFGKIKKGDRDSKNNDQLIKVREINDYHHAKDAYLNVVVGNVYDTKFTRNVFNFIKDKKDGRKYSLNKVFYENVSDSKTVAWEMDKTIHQVEKVMNNNNIMVTRRTSEQKGGLFDATVYKAKVAAKAKDGVYYPLKTSNSVVKDVAKYGGYTSIGIAYYSIFEYTIVNKKGEEKITRIIPIPIYISQNIKDSTALIEFGKSQIFCRAYEKIKDFKLLYRKLCIGSKININNYQYYIGGKSDERFYYDSAIQVTLDKKSEKYLKILSKYQNWKKENKDGELWENITKENNIELYNKLVEKMNSEIFTKKKSNKYNELNSEEIRNNFIKISVEEQAKVLLEILNLLTNKKSIFDLKSIDIKAARGKISFNLTSLIQFSIIEQSITGFYEKEITIIGDKGNDMENNNS

SEQ ID NO: 109 - protein, 702 aa, Helicobacter pullorum
MRKILKIDERIQFKEVDYTAKNPENKKFVEFKNLKKFCEILGAIVGDRALADSIARDMTLIKDEEELAQKLRGYGKFSQEQITQLSALHFSHHISLSLKALSEILPFMREGMRYDEACQEAKLQAKHNDKKSKFLPPFCESIYADELTNPVVHRAIAEYRKILNALIAKYGSVHKIHIELTRDVGKNFQEREKYKKEIESNYKARVQAMQECEKLGLTLSEGNILKLRLFREQNEICVYSGRKITLANLKEQGALEIDHILPYSRSSDDSYMNKVLVFTNENQNKGNKTPYEAFGGDSQKWGEIESLALRSGYPKKKAKRILDKGFGDREAGFKSRNIVDSGYIARLIANYTKEYLKFLPLDSHENTALIAGEKDSKIHVEAVKGMLTATMRHFWGLGSKNRYEHTHHAVDAIIIAYINAAMIQRFSQFRQNQESLKARFYAKELAKEEFKTQRAFFEPFSGFREQVLAKVGQIFVSRPPRKRARGALHEETFYSIDDKKLSETYGGKKGVQRALSLGKIRQIGTKIVANGPMVRVDIFKHTQSGRFYAVPIYTMDFALGILPNKAVVSGKDKDRIIKDWLEMDSCYEFCFSLFKDDVIEVQKRDMEKPELAYFVSLDASDGRIKVRHHCNDITKINENQKKLFSEAIEKEVVGRGSIQNLKVFKKYKVSPLGEIKEAKYEPRQPIALKTSPKKHRKQNNAQ

SEQ ID NO: 110 - protein, 1371 aa, Streptococcus dysgalactiae
MDKKYSIGLDIGTNSVGWAVITDDYKVPSKKFKVLGNTDRHSIKKNLIGALLFDSGETAEATRLKRTARRRYTRRKNRIRYLQEIFSSEMSKVDDSFFHRLEESFLVEEDKKHERHPIFGNIVDEVAYHEKYPTIYHLRKKLADSTDKADLRLIYLALAHMIKFRGHFLIEGDLNPDNSDMDKLFIQLVQTYNQLFEENPINASRVDAKAILSARLSKSRRLENLIAQLPGEKRNGLFGNLIALSLGLTPNFKSNFDLAEDAKLQLSKDTYDDDLDNLLAQIGDQYADLFLAAKNLSDAILLSDILRVNSEITKAPLSASMIKRYDEHHQDLTLLKALVRQQLPEKYKEIFFDQSKNGYAGYIDGGASQEEFYKFIKPILEKMDGTEELLAKLNREDLLRKQRTFDNGSIPHQIHLGELHAILRRQEDFYPFLKDNREKIEKILTFRIPYYVGPLARGNSRFAWMTRKSEETITPWNFEEVVDKGASAQSFIERMTNFDKNLPNEKVLPKHSLLYEYFTVYNELTKVKYVTEGMRKPEFLSGKQKEAIVDLLFKTNRKVTVKQLKEDYFKKIECFDSVEISGVEDRFNASLGTYHDLLKIIKDKDFLDNEENEDILEDIVLTLTLFEDKEMIEERLKKYANLFDDKVMKQLKRRHYTGWGRLSRKLINGIRDKQSGKTILDFLKSDGFANRNFMQLINDDSLTFKEAIQKAQVSGQGHSLHEQIANLAGSPAIKKGILQSVKVVDELVKVMGHKPENIVIEMARENQTTQKGQKNSRERMKRIEEGIKELGSQILKEHPVENTQLQNEKLYLYYLQNGRDMYVDQELDINRLSDYDVDHIVPQSFIKDDSIDNKILTRSDKNRGKSDNVPSEEVVKKMKNYWRQLLNAKLITQRKFDNLTKAERGGLSELDKAGFIKRQLVETRQITKHVAQILDSRMNTKYDENDKLIREVKVITLKSKLVSDFRKDFQFYKVREINNYHHAHDAYLNAVVGTALIKKYTKLESEFVYGDYKVYDVRKMIAKSEQEIGKATAKRFFYSNIMNFFKTEITLANGEIRKRPLIETNEETGEIVWDKGRDFATVRKVLSMPQVNIVKKTEVQTGALTNESIYARGSFDKLISRKHRFESSKYGGFGSPTVTYSVLVVAKSKVQDGKVKKIKTGKELIGMTLLDKLVFEKNPLKFIEDKGYGNVQIDKCIKLPKYSLFEFENGTRRMLASVMANNNSRGDLQKANEMFLPAKLVTLLYHAHKIESSKELEHEAYILDHYNDLYQLLSYIERFASLYVDVEKNISKVKELFSNIESYSISEICSSVINLLTLTASGAPADFKFLGTTIPRKRYGSPQSILSSTLIHQSITGLYETRIDLSQLGGD

SEQ ID NO: 111 - protein, 1007 aa, Helicobacter canadensis
MKVLGFDIGINSIGWAFVENNELKDCGVRLFTKAENPKTKESLALPRRNARSSRVRLRRRRSRLLSLKHIISKEFGLHYEDYIALDGNLPKAYTGKIESIYKLRYEALSQAISKEDLARVILHIAKHRGYMNKNQKTSQDSEKGAILSAIKENSNKIKHYQTAGEYFYKELFENLRDGTKEFKNIRNKAMKNEKTGNMESTYYNTILASDLEKELKLILEKQQAYHNYSDTFIKEVLEIAFYQRPLKDFSHLVGSCTFYENEKRACKNSYSAWEFIALGKIINTLESIKKDTGEIFSNEIITQILKEVLDKGSLSYTKLRKMINLDEKVKFKGLKYDKEGVEKTNLIEFKKLKEFKKALGEHNLERKTLDEIATHITLTKDENQLKKQLEQYALSQNQIDALAELDFNDHINLSFKALYEILPLMEKGKRYDEACNELGLKAKTSNQKSEFLPAFCDSIFAQELTNPIVNRAISEYRKVLNRLLKKYGKMHKIHIELARDAGLSKEARNKIEKEQKENKDINDKAEKTCKEFGLKPNAKNILKIKLWREQGEICAYSGKKITIDDLKEDKALEVDHIYPYSRSYDDSYNNKVLVFIKENQLKLNQTPYEAFGSNQEKWSKIQVLAQKLPYKKKNRILDENFKNKDQIEFISRNLNDTRYATSLIAKYTKEYLEFLPLSDDEDISLKSGEKGSKTHVQTMNGMLTSVLRHAWGFSQKDRNNHLHHALDAIIIAYSTNSIIKAFSDFKKNQEILKAKLYAKKLTSEEYKNQSKFTGFEKYRSKILEKLDSIFVSKPPNKNTKGALHEQTFYSYQDILEEYKTQEGLKRALECGKVRKIGTKYVVNDRMVRLDIFKKDNKFYGIPIYTMDFALGVLPNKVVTIGTDKDKIKKEWKTIDETYEFCFSLYKGDLVLIQKKEMQESEFAYYNGFDISSASISLEKHDNKFENLTENQKLLFPKAKEGDVEVRGIGIQGLKVFKKYMVTPLGEIQETRTEARQNIQPRKKHGLR

SEQ ID NO: 112 - protein, 1397 aa, gamma proteobacterium
MTKNYISPIAIDLGAKFTGVALYQYLEGADCTQEVAKGLLVDDRGNVTWSQEGRRGKRHQVRGYKRRKMAKRLLWLILDSEYGIKREEVTEPLLKFINGLLNRRGYTYISEEVDEESMNVSPLPFSEMMPDYFNSSAPLLEQLAKLLSDKNKLVRFRAEGKIPSNKNEFKKLLDTALDGKYKDEKKELSEAWGNILIASENVLKSTVDGHKSRSEYLANIKEDIKSNEELEKQISSKEIDGFYNLVGHLSNFQLRLLRKYFNDPNMSGVSYWDEKRLEKYFYQWVQGWHTKGGTDEAEKKNIILKTKGAPLLKTLKSLSADLTIPPYEDQNNRRPPKCQSVLLSDEKLTMHYPKWKEWVGQLVKQNDNAYLNENVTLANALHRIVERSRSIDPYQLRLLISITDAEKRNDLAGYKRLKLSLGSEVDEFLLLVKNIVDETKEAREGLWFETENKLFFKCGKTPPRKEKLKSTLLSAVLGKNLSDDEQSSFIEEFWKSGTPKIERRNVRGWCRLASQVQKTYGVYLKEYGLQQLHKLEAGKKLDDKPLALLYKNSGLIASKIGEALNIEPDEVSRFASPHSLAQIFNIIEGDVAGFNKTCRACTYENIWRMQEEKVESLLTNQLLSEIHGERKVPLKSAMCTRLSADSTRPFDGQMASIIEHIARKIAQHKIAQINDVPKEFSIDIPIIIESNQFSFTAELEEIKRGRGSAKAKKAKELGEKSKAGWVSKTERIKTSSEGICPYTGAPLGGSGEIDHIIPRSLTGRTKKTVFNSEANLIYCSSKGNHDKGNRVYVIEQLNDKYLKKQFSTSDVNLIKKKIKTTIQRFTEGGEKLRSFSELSREDQKAFRHALFVPELKSEVTSLLAVKNITRVNGTQAWLAKKIASLLAEHLDKQGRDYTLSAHQIDPWSVSKQRKMLASAEPIWAKKDPQPAASHVVDAVCTFLEALEQPHTASRLKTISSTSFEKTGWRSALIPDLIKVDALDRRPKYRRYNIGSTSLFKDGIYAERFLPILIDENGLMAGYDIDNSLKAKGADVVFESLSPFLLFKGEEVGAQSLSDWQERIDGRYLYMSIDKVKAFDYLQEKVGEKDIAAELLNSIHFTQRKTELRAKFSDDSGKKMKTLDAIRKSLKLTVTVNEIGKRKEKCGFSGTIGIPAKSAWENLLDEPLLETYWGTKMPPQEIWEKVYRKHFPRNIPNQAHRKVRKDFSLPVVDSVSGGFRVKRKTPNGYNYQLLAIDGYSAVGFKKEGDNVDFKSPALVPQIAESKSVTPISSELVHLDKNEIVYFDEWRKIDISDSDLKQFVSSLELAPGSQNRFYIRFTVDEDQFERHFKSALRVNGIQDLDTVNKTFDWNREIPSLLIPPRSNLFLLETGQKITFEYIANGANAEVKKAYSLRRA

SEQ ID NO: 113 - protein, 1082 aa, Neisseria meningitidis
MAAFKPNPINYILGLDIGIASVGWAMVEIDEEENPIRLIDLGVRVFERAEVPKTGDSLAMVRRLARSVRRLTRRRAHRLLRARRLLKREGVLQAADFDENGLIKSLPNTPWQLRAAALDRKLTPLEWSAVLLHLIKHRGYLSQRKNEGETADKELGALLKGVADNAHALQTGDFRTPAELALNKFEKESGHIRNQRGDYSHTFSRKDLQAELILLFEKQKEFGNPHISGGLKEGIETLLMTQRPALSGDAVQKMLGHCTFEPAEPKAAKNTYTAERFIWLTKLNNLRILEQGSERPLTDTERATLMDEPYRKSKLTYAQARKLLGLEDTAFFKGLRYGKDNAEASTLMEMKAYHAISRALEKEGLKDKKSPLNLSPELQDEIGTAFSLFKTDEDITGRLKDRIQPEILEALLKHISFDKFVQISLKALRRIVPLMEQGKRYDEACAEIYGDHYGKKNTEEKIYLPPIPADEIRNPVVLRALSQARKVINGVVRRYGSPARIHIETAREVGKSFKDRKEIEKRQEENRKDREKAAAKFREYFPNFVGEPKSKDILKLRLYEQQHGKCLYSGKEINLGRLNEKGYVEIDHALPFSRTWDDSFNNKVLVLGSENQNKGNQTPYEYFNGKDNSREWQEFKARVETSRFPRSKKQRILLQKFDEDGFKERNLNDTRYVNRFLCQFVADRMRLTGKGKKRVFASNGQITNLLRGFWGLRKVRAENDRHHALDAVVVACSTVAMQQKITRFVRYKEMNAFDGKTIDKETGEVLHQKTHFPQPWEFFAQEVMIRVFGKPDGKPEFEEADTPEKLRTLLAEKLSSRPEAVHEYVTPLFVSRAPNRKMSGQGHMETVKSAKRLDEGVSVLRVPLTQLKLKDLEKMVNREREPKLYEALKARLEAHKDDPAKAFAEPFYKYDKAGNRTQQVKAVRVEQVQKTGVWVRNHNGIADNATMVRVDVFEKGDKYYLVPIYSWQVAKGILPDRAVVQGKDEEDWQLIDDSFNFKFSLHPNDLVEVITKKARMFGYFASCHRGTGNINIRIHDLDHKIGKNGILEGIGVKTALSFQKYQIDELGKEIRPCRLKKRPPVR

SEQ ID NO: 114 - protein, 1334 aa, Listeria monocytogenes
MKKPYTIGLDIGTNSVGWAVLTDQYDLVKRKMKISGDSEKKQIKKNFWGVRLFEKGETAAKRRMSRTARRRIERRRNRISYLQEIFAIQMNEVDDNFFNRLKESFYAESDKKYNRHPFFGTVEEEVAYYKDFPTIYHLRKELIDSQKKADLRLVYLALAHIIKYRGHFLIEGALDTKNTSIDEMFKQFLQIYNQVFANDIEEASLKKTEKNQEVAQILAEKFTRKDKLDKILSLYPGEKTTGVFAQFVNIIVGSTGKFKKHFNLHEKKDINCAEDTYDTDLESLLAIIGDEFAEVFVAAKNAYNAVVLSNIITVTDSTTRAKLSASLIERFENHKEDLKKMKRFVRTYLPEKYDEIFDDTEKHGYAGYISGKTKQADFYKYMKATLEKIEGADYFIAKIEEENFLRKQRTFDNGVIPHQLHLEELEAILHQQAKYYPFLREDYEKIKSLVTFRIPYFVGPLAKGQSEFAWLTRKADGEIRPWNIEEKVDFGKSAVDFIEKMTNKDTYLPKENVLPKHSLCYQKYMVYNELTKVRYIDDQGKTNYFSGQEKQQIFNDLFKQKRKVKKKDLELFLRNINQIESPTIEGLEDSFNASYATYHDLLKVGMKQEILDNPLNTEMLEDIVKILTVFEDKRMIKEQLQQFSDVLDGTVLKKLERRHYTGWGRLSAKLLVGIRDKQSHLTILDYLMNDDGLNRNLMQLINDSNLSFKSIIEKEQVSTTDKDLQSIVAELAGSPAIKKGILQSLKIVDELVSVMGYPPQTIVVEMARENQTTNKGKNNSKPRYKSLEKAIKEFGSQILKEHPTDNQELKNNRLYLYYLQNGKDMYTGQELDIHNLSNYDIDHIVPQSFITDNSVDNLVLTSSAGNREKGDNVPPLEIVQKRKIFWEKLYQGNLMSKRKFDYLTKAERGGLTEADKARFIHRQLVETRQITKNVANILHQRFNYKTDGNKDTMETVRIVTLKSALVSQFRKQFQFYKVREVNDYHHAHDAYLNGVVANTLLKVYPQLEPEFVYGEYHQFGWFKANKATAKKQFYTNIMLFFAQKDRIIDENGEILWDKRYLETVKKVLGYRQMNIVKKTEIQKGEFSNVTPNPKGKSNKLIPRKKDWDPIKYGGFDGSKMAYAIIIEYEKQKRKVRIEKKLIQINIMEREAFEKDEKTFLEEKGYHQPKVLIKVPKYTLYECKNGRRRMLGSANEAHKGNQMLLPNHLMALLYHAEKYEAIDGESLAYIEVHRALFDELLAYISEFARKYTLSNDRLDEINMLYERNKDGDVKSIAESFVSLKKFNAFGVHQDFSFFGTKIERKRDRKLNELLNSTIIYQSITGLYESRKRLDN

SEQ ID NO: 115 - protein, 1337 aa, Enterococcus faecalis
MKKDYVIGLDIGTNSVGWAVMTEDYQLVKKKMPIYGNTEKKKIKKNFWGVRLFEEGHTAEDRRLKRTARRRISRRRNRLRYLQAFFEEAMTALDENFFARLQESFLVPEDKKWHRHPIFAKLEDEVAYHETYPTIYHLRKKLADSSEQADLRLIYLALAHIVKYRGHFLIEGKLSTENISVKEQFQQFMIIYNQTFVNGESRLVSAPLPESVLIEEELTEKASRTKKSEKVLQQFPQEKANGLFGQFLKLMVGNKADFKKVFGLEEEAKITYASESYEEDLEGILAKVGDEYSDVFLAAKNVYDAVELSTILADSDKKSHAKLSSSMIVRFTEHQEDLKKFKRFIRENCPDEYDNLFKNEQKDGYAGYIAHAGKVSQLKFYQYVKKIIQDIAGAEYFLEKIAQENFLRKQRTFDNGVIPHQIHLAELQAIIHRQAAYYPFLKENQEKIEQLVTFRIPYYIGPLSKGDASTFAWLKRQSEEPIRPWNLQETVDLDQSATAFIERMTNFDTYLSSEKVLPKHSLLYEKFMVFNELTKISYTDDRGIKANFSGKEKEKIFDYLFKTRRKVKKKDIIQFYRNEYNTEIVTLSGLEEDQFNASFSTYQDLLKCGLTRAELDHPDNAEKLEDIIKILTIFEDRQRIRTQLSTFKGQFSAEVLKKLERKHYTGWGRLSKKLINGIYDKESGKTILGYLIKDDGVSKHYNRNFMQLINDSQLSFKNAIQKAQSSEHEETLSETVNELAGSPAIKKGIYQSLKIVDELVAIMGYAPKRIVVEMARENQTTSTGKRRSIQRLKIVEKAMAEIGSNLLKEQPTTNEQLRDTRLFLYYMQNGKDMYTGDELSLHRLSHYDIDHIIPQSFMKDDSLDNLVLVGSTENRGKSDDVPSKEVVKDMKAYWEKLYAAGLISQRKFQRLTKGEQGGLTLEDKAHFIQRQLVETRQITKNVAGILDQRYNANSKEKKVQIITLKASLTSQFRSIFGLYKVREVNDYHHGQDAYLNCVVATTLLKVYPNLAPEFVYGEYPKFQAFKENKATAKAIIYTNLLRFFTEDEPRFTKDGEILWSNSYLKTIKKELNYHQMNIVKKVEVQKGGFSKESIKPKGPSNKLIPVKNGLDPQKYGGFDSPVVAYTVLFTHEKGKKPLIKQEILGITIMEKTRFEQNPILFLEEKGFLRPRVLMKLPKYTLYEFPEGRRRLLASAKEAQKGNQMVLPEHLLTLLYHAKQCLLPNQSESLAYVEQHQPEFQEILERVVDFAEVHTLAKSKVQQIVKLFEANQTADVKEIAASFIQLMQFNAMGAPSTFKFFQKDIERARYTSIKEIFDATIIYQSTTGLYETRRKVVD

SEQ ID NO: 116 - protein, 1426 aa, Capnocytophaga ochracea
MKNILGLDLGTTSIGFAHIVEDENKEKSEIKELGVRIVSLTTDEQSDFEKGKSITTNANRTLKHGARLNLDRYQQRRKYLIDLLQKANLITPSSILAENGKNTTHSTWQLRAKAVTERIEKEEFARILLAINKKRGYKSSRKAKTEDEGQAIDGMAIAKRLYDENLTPGQLSLQLLQQNKKLLPDFYRSDLQKEFDLVWNFQKQFYPDILTDIFYKELQGKGKDATSKAFSKRYHFDTTENKGSKESVRLQAYQWRAEAISKQLSKEEVAYVLTEINNNLNNASGYLGAISDRSKELYFNRQTVGQYLYAKLQENRHNSLKNKVFYRQDYLDEFERIWETQASFHKELTDELKKQIRDVVIFYQRKPKSQKGLISFCEFESKEIEIEKDGKTITKNIGARVVPKSSPLFQEFKIWQILNNVICKRKGIRKKKISAKTTQLDLLNESSQTIFSLDMECKQLLFDELNLKGDLKSDKVLKLLGYSPQEWEINYNQLEGNRTQKALYEAYLKIVEMEAHDVKDILQIKSAKDDWSLDESPLSASEIREKVKAIFQTLGICTKILYFDPLLPVKEFEEQDSYQLWHLLYSYESDDSTSGNETLYRILEKKYAFKREHARILANVALQDDYGSLSTKAIRKIYPNIKENQYSTACEKAGYKHSKLSLTTEELEARELKNIIPLLKKNALRNPVVEKILNQMINVVNALIEKNSERDAEGKITKYFHFDEIRIELARELKKNAQKRYEMTQNINKAKLEHQKISEILQKEFGIKNPTKSDIIRYRLYQELEHNGYKELYTNAPIARDMLFSKNIEIEHIVPKARVFDDSFSNKTLTFHRINSDKGEYTAFDYITSLNSEEELNQYLTRVENAYKTKSISPTKYKNLLKKASEIGDDFINRDLRDTQYIAKKAKEILFQVTKNVLSTSGSITDRLREDWGLVDVMKELNMPKYQSLGLTEVEERKDGNKVTVIKNWTKRNDHRHHAMDALTVAFTKPSYIQYLNHLNARKDENNKNYSVILAIEEKETIKVPTNNGKNKRVFIEPIPNFRQVAKKHLEEIFISHKAKNKVVTKNTNKPAGTDKQQITLTPRGQLHKETIYGKYQYYINKEEKIGVKFDERTIAKVSNPVYREALLKRLQANDNDPKKAFAGKNALSKNPIYLDESKTKTLPEKVNLTYLEEDFSIRKDISPDNFKDLKSIEKVIDQGVKRILIKRLQAYDNDPKKAFVDLEKNPIWLNKEKGIAIKRVTISGVNNAQPLHIGKDHLGKTTLNKEGKEIPVDYVSTGNNHHVAIYRDKEGNLQEQIVSFFDAVVRAQQGIPIIDKTYKQAEGWQFLFTMKQNEMFVFPNATTGFNPAEIDLLDPKNKKLISPNLFRVQKIATKDYFFRHHLETNVETDNILKNVTWKREGLSGLKDIVKVRINHLGDIVSIGEY

SEQ ID NO: 117 - protein, 1424 aa, Parabacteroides sp.
MKRILGLDLGTNSIGWALVNEAETDEEVSSIIRLGVRVNPLTVDETQNFEKGKSITTNAERTLKRSMRRNLQRYKLRRDALVEFLKELGFITDETILSEQGNRTTFETCRLRAKAAEEEISLEELSRVLLMINKKRGYKSSRKVKKEEDGVLIDGMEIAKKLYEEDLTPGQLCSQLLESGKKVLPDFYRSDLQEELDRIWSVQKQFHPDVFCDAAKEEIKGKNRSQTWAILANYFVWKEEVVGWNDREAKNETIEKECKLVGLKRTTKGYELKKENYRWRAQALTEQLGLEEIAVVLQEINGQINASSGYLGAISDRSKVLYFNHQTVGQYQMAELDKNPHASLRNMVFYRQDYLDEFDRIWEKQAEFHKELTAELKKEIRDMIIFYQRRLKSQKGLISFCEFERLEIVVEKDGKKQTKVIGCKVIPRSHPLFQEFKVWQTLNDIKVLGREKKRNALSASESRALYPEEKEILARELAIKENMKKADVLKLLFENPQELDLNFKQIDGNRTGFSLFSAYSKMIEKYGYEPLDFKKPADEIIGQLRTIFTDLGWNTNLFTIDLTKEGKELEMQPYFRLWHLLYSFEGDNTSTGNGKLIEKIMQLCGVEKEYAVELASLSFQDDYGSLSAKAIKRILPYLKEGNLYDVACEYAGYRHSKSSLTKEEIENKVLKGKLEVLPKNSLRNPVVEKILSQMVNVINTIIDTYGKPDEIRVELARELKKSAKEREELTKAIAKSTREHEEIRKLLQDEFGMMNVSRNDIIRYKLYEELKDNGYKTLYSNQYIPKEKIFSKEIDIEHIIPQSRLFDDSLSNKTLEYKAINIEKGNKTAYDFVKEKYGEEGLQQYINRCESLFNDKKAKLRKLKMEQKDIPDGFIDRDLRNTQYIAKKALAMLNEICRRVVATTGSITDQLREDWQLVDVMKELNLPKYEALGFVETYEDKDGRKIKRIKDWTKRNDHRHHAMDALTVAFTKDAFIQYFNNKNAAQDSGNRNHTNIIGIKTRYFDKGRALPPIPLEQFRIEAKQHLEKLLVSIKAKNKVVTVNVNRTKKRKGENTKIQQTPRGQLHLETVYGSHKQYVTKIEKVNASFDAAKIATVSKRAYRNALLKRLETFGNDPKKAFTGKNALEKNPLYADKYQTIRVPEKVQTVEFETIYTIRKPVDPALNVDKVVDVKVRAILERRLKEYGGDPKKAFVNFWENPIWLNKEKGISIKRVSIRGINNAQSIHVKKDKNGNPIWDENGKQIPVDFVNTGNNHHVAIYRKPVLDKKGQVTFDEDGNLMYELDEVVVPFFEAVTRANLGLPIIDKDYRKSEGWQFLFSMKQNEYFVFPNEKTGFNPKEVDLLNPDNYAMISPNLFRVQTMSKVMYGNNVVRDYKFRHHLETTVKDMKELKDIAYKQYKTLSFGNSVVKIRINHIGQIVSVGEY

SEQ ID NO: 118 - protein, 1395 aa, Lactobacillus jensenii
MKEIKDYIIGLDIGTNSCGYVVTDKQNNILKLKGKTAIGARLFKEGQAAADRRSFRTTRRRLARRHWRLGLLEEIFDPEMEKIDPNFFRRLKESDYSPKDSRKQFNAIVFKSIKADKRFYKKYPTIYHLRNALMHDNQKHDLREIFMAVHHIVKYRGNFLREDSVNAFKAAKFSLRGEDGIGPVDKLNDLLKEIYSEYSPELATNNLSKIEDIIKDKNLYKQDKLKQVATLLIKEADSKDKAKLNKDIAKQVANSFMGYMFRLDTLFSLTDVDVKDYKLKFSDANIDESLDDLTSLLTDAQIEFVLELQSIYNTIVLNEIVPDGMSLSESMIKKYDDHKEDLKIFKEYIDSLSDQKKAKKLLSAYNLYVNYRKSDLVEAKNLFKNKKVGDKNFADVISNFEVFGKFVSDNLDDSELANKIKARLDLGEFLPKQRTNQNGVIPYQLHQVELTQILEKQGKYYPFLITPNPVESHRNNAPYEISELVSFRVPYYVGPLIDNQSIKDKQNKNKFAWMVRQKQGQITPWNLEEMVDTTESANQFIKRMTRKDTYLLAEDVLPKSSLVYQKFMILDELNRIKIDGKKLTSELKHDIFEKLFKKQKSINLDNLKNYLLVEGNIPGLIEGLSDGINFNNSFSTYIDYRNIFGDEIDNPNKQADFEKMIEWSTVFEDRKIFKRKLKEITWLTSEQIKQVSSKRYSGWGRLSKKLLTQITDENGVNILQRLWNEPETLTEVLANPVIKRKIVEANSSFTKAKDMKDILVEAYTSPQNKKAIRQVMRVVDDIIAAAHGKKPSQIAIEFAREDQDNPQMTKSRKAQLDQIYAKISDEFLDDAVKNELKNMKDNKPLAKDKVFLYFKQMGRDAYSGEKLSLDNLQDYDIDHIYPQSFIKDDSFDNRVLVQRAYNNGKSDNVPVLLFGNKIAAGLGITIRQMWKKWLELGLISKRKFNNLITDPEKISRNMASGFVNRQLVETSQVIKLVANILQAKLPDTEIIEVKASYNSILRKEFNLYKSREVNDYHHAIDAYLTTIVGNYLYQVYPKLRPYFVYGQFKKFGKAENQEDDPVKKIKKFNFIYQLIWGKDDAICISHTNQQVFSKKDIIDKLTTAYNFKYMNISHAVYTRNNNMFKQTLFPIIERTTAKTKSLIPKKLDRPTDIYGGYSNNNDAYLALVKVDKKRGSEYRVVGIPMRAAAMLKASKNYDEDLRKVIEPMVMFDKNGKAKRGIEGFRVLVGKMPFKQAVLDGNKKFMLTGTVDTPNLKQLVLSQQNMKYILDYIEDVDCRKHKFGDKVQNPDKCLLEVFDEIIEIVDKYFELFDSRDFREKLRNSRNKFIKLEASKKADTILAILKGLQAKSTRATIKELNISDFGRIITSSISPEAQLIYQSPTGLFERRVKVKDL

SEQ ID NO: 119 - protein, 1140 aa, Roseburia intestinalis
MRENGSDERRRNMDEKMDYRIGLDIGIASVGWAVLQNNSDDEPVRIVDLGVRIFDTAEIPKTGESLAGPRRAARTTRRRLRRRKHRLDRIKWLFENQGLINIDDFLKRYNMAGLPDVYQLRYEALDRKLTDEELAQVLLHIAKHRGFRSTRKAETAAKENGAVLKATDENQKRMQEKGYRTVGEMIYLDEAFRTGCSWSEKGYILTPRNKAENYQHTMLRAMLVEEVKEIFSSQRRLGNEKATEELEEKYLEIMTSQRSFDLGPGMQPDGKPSPYAMEGFSDRVGKCTFLGDQGELRGAKGTYTAEYFVALQKINHTKLVNQDGETRNFTEEERRALTLLLFTQKEVKYAAVRKKLGLPEDILFYNLNYKKAATKEEQQKENQNTEKAKFIGMPYYHDYKKCLEERVKYLTENEVRDLFDEIGMILTCYKNDDSRTERLAKLGLVPIEMEGLLAYTPTKFQHLSMKAMRNIIPFLEKGMTYDKACEEAGYDFKADSKGTKQKLLTGENVNQTINEITNPVVKRSVSQTVKVINAIIRTYGSPQAINIELAREMSKTFEERRKIKGDMEKRQKNNEDVKKQIQELGKLSPTGQDILKYRLWQEQQGICMYSGKTIPLEELFKPGYDIDHILPYSITFDDSFRNKVLVTSQENRQKGNRTPYEYMGNDEQRWNEFETRVKTTIRDYKKQQKLLKKHFSEEERSEFKERNLTDTKYITTVIYNMIRQNLEMAPLNRPEKKKQVRAVNGAITAYLRKRWGLPQKNRETDTHHAMDAVVIACCTDGMIQKISRYTKVRERCYSKGTEFVDAETGEIFRPEDYSRAEWDEIFGVHIPKPWETFRAELDVRMGDDPKGFLDTHSDVALELDYPEYIYENLRPIFVSRMPNHKVTGAAHADTIRSPRHFKDEGIVLTKTALTDLKLDKDGEIDGYYNPQSDLLLYEALKKQLLLYGNDAKKAFAQDFHKPKADGTEGPVVRKVKIQKKQTMGVFVDSGNGIAENGGMVRIDVFRVNGKYYFVPVYTADVVKKVLPNRASTAHKPYGEWKVMEDKDFLFSLYSRDLIHIKSKKDIPIKMVNGGMEGIKETYAYYIGADISAANIQGIAHDSRYKFRGLGIQSLDVLEKCQIDVLGHVSVVRSEKRMGFS

SEQ ID NO: 120 - protein, 992 aa, Treponema vincentii
MQKNSGEDENCGFEFLTEEEKELIKPLFFRISKPSFQFADIEKKLKGKNGFWKFNYRKDTNVSGCPVSAGLKNIFGDEASAESWKDKKVGQYDMCDIWHVLFDFDDEEKLLEFAKRKLFLSDEAAKKFCAIRIQQGYANLSLKAIRKITPFLRKGYIYSTAVFLANIPFMIGRDIFLQNEKEIEDSVKNIIGTLRDKNNIIVLANRCIESAFKDKDNDFRFEEWDKALVENSAWDLFGKKKWNEYDEEKRKTIISQVSEKVEDNLKIAVGKNPNDYKYPLLRTDDLIMDYLNQKGFVVKGELYHPSDTDYNFETPVPAEDGKIYLASPRSPSVKNPVVMRALHQLRKLVNYLIKTGKIDSTTKINVELANDVNDKNQRKAIEELAKTNEKNNADARKKIEELCNEAGFKVVPTESDIKKFRLWKEQNETCPYTGKHISFTDLFGPIPKFDFEHTIPRSLSYDDSLENLTLCDSEFNRNIKKQRLPSELPDFEEINKRFLKFYEDKIDNCLRIIELNSKSGGSYEEPAVKDLRIVKKHKAQYELNYYKEKLRRFSSTEITSGFKHSQLNDTRIITKFSLSYLKGVFDHVQPVKGSMTDTFKRQWGLMERNEIKDRSNHTHHTVDALTVACINRGKFNLLSEAIKNSSDGKHLKFPKPWETFDTDVLNAVRYIIPKYFSDESSLRQSKKILRGRDGKPVLKNGKAVFIQGATARGSLHKDTFYGCIKTVPEKGGKSEMIFVQRIPVSTLDEKVAEKIIDKRIRKTFEKNLSTGIQTLQEIQTDGILLPFKKEGRDVFVKRVRIKAHPTSPIILKKHHNVINKNPKDYKQNYYVENEENYLLAIYRGKDAKGKDVSDHKLCNLLNAVKSRQNKTGFYPDFKEKKGINLQLYKVLKIGKIVILQNDIQEDVFALPKEKLWKRMYRIAGLATSRNDIQIKLVHIIRETPWGYMKGEKDLNAGKECLLYGTANFKGLVEGQDFTVSPAGEIIQKARVC

SEQ ID NO: 121 - protein, 1340 aa, Enterococcus faecium
MKKEYTIGLDIGTNSVGWSVLTDDYRLVSKKMKVAGNTEKSSTKKNFWGVRLFDEGQTAEARRSKRTARRRLARRRQRILELQKIFAPEILKIDEHFFARLNESFLVPDEKKQSRHPVFATIKQEKSYHQTYPTIYHLRQALADSSEKADIRLVYLAMAHLLKYRGHFLIEGELNTENSSVTETFRQFLSTYNQQFSEAGDKQTEKLDEAVDCSFVFTEKMSKTKKAETLLKYFPHEKSNGYLSQFIKLMVGNQGNFKNVFGLEEEAKLQFSKETYEEDLEELLEKIGDDYIDLFVQAKNVYDAVLLSEILSDSTKNTRAKLSAGMIRRYDAHKEDLVLLKRFVKENLPKKYRAFFGDNSVNGYAGYIEGHATQEAFYKFVKKELTGIRGSEVFLTKIEQENFLRKQRTFDNGVIPHQIHLSELRAIIANQKKHYPFLKEEQEKLESLLTFKIPYYVGPLAKKQENSPFAWLIRKSEEKIKPWNLPEIVDMEGSAVRFIERMINTDMYMPHNKVLPKNSLLYQKFSIYNELTKVRYQDERGQMNYFSSIEKKEIFHELFEKNRKVTKKDLQEFLYLKYDIKHAELSGIEKAFNASYTTYHDFLTMSENKREMKQWLEDPELASMFEEIIKTLTVFEDREMIKTRLSHHEATLGKHIIKKLTKKHYTGWGRLSKELIQGIRDKQSNKTILDYLINDDDFPHHRNRNFMQLINDDSLSFKKEIKKAQMITDTENLEEIVKELTGSPAIKKGILQSLKIVDEIVGIMGYEPANIVVEMARENQTTGRGLKSSRPRLKALEESLKDFGSQLLKEYPTDNSSLQKDRLYLYYLQNGRDMYTGAPLDIHRLSDYDIDHIIPRSFTTDNSIDNKVLVSSKENRLKKDDVPSEKVVKKMRSFWYDLYSSKLISKRKLDNLTKIKLTEEDKAGFIKRQLVETRQITKHVAGILHHRFNKAEDTNDPIRKVRIITLKSALVSQFRNRFGIYKVREINEYHHAHDAYLNGVVALALLKKYPQLAPEFVYGEYLKFNAHKANKATVKKEFYSNIMKFFESDTPVCDENGEIFWDKSKSIAQVKKVINHHHMNIVKKTEIQKGGFSKETVEPKKDSSKLLPRKNNWDPAKYGGLGSPNVAYTVAFTYEKGKARKRTNALEGITIMEREAFEQSPVLFLKNKGYEQAEIEMKLPKYALFELENGRKRMVASNKEAQKANSFLLPEHLVTLLYHAKQYDEISHKESFDYVNEHHKEFSEVFARVLEFAGKYTLAEKNIEKLEKIYKENQTDDLAKLASSFVNLMQFNAMGAPADFKFFDVTIPRKRYTSLTEIWQSTIIHQSITGLYETRIRMGK

SEQ ID NO: 122 - protein, 1363 aa, Lactobacillus rhamnosus
MTKLNQPYGIGLDIGSNSIGFAVVDANSHLLRLKGETAIGARLFREGQSAADRRGSRTTRRRLSRTRWRLSFLRDFFAPHITKIDPDFFLRQKYSEISPKDKDRFKYEKRLFNDRTDAEFYEDYPSMYHLRLHLMTHTHKADPREIFLAIHHILKSRGHFLTPGAAKDFNTDKVDLEDIFPALTEAYAQVYPDLELTFDLAKADDFKAKLLDEQATPSDTQKALVNLLLSSDGEKEIVKKRKQVLTEFAKAITGLKTKFNLALGTEVDEADASNWQFSMGQLDDKWSNIETSMTDQGTEIFEQIQELYRARLLNGIVPAGMSLSQAKVADYGQHKEDLELFKTYLKKLNDHELAKTIRGLYDRYINGDDAKPFLREDFVKALTKEVTAHPNEVSEQLLNRMGQANFMLKQRTKANGAIPIQLQQRELDQIIANQSKYYDWLAAPNPVEAHRWKMPYQLDELLNFHIPYYVGPLITPKQQAESGENVFAWMVRKDPSGNITPYNFDEKVDREASANTFIQRMKTTDTYLIGEDVLPKQSLLYQKYEVLNELNNVRINNECLGTDQKQRLIREVFERHSSVTIKQVADNLVAHGDFARRPEIRGLADEKRFLSSLSTYHQLKEILHEAIDDPTKLLDIENIITWSTVFEDHTIFETKLAEIEWLDPKKINELSGIRYRGWGQFSRKLLDGLKLGNGHTVIQELMLSNHNLMQILADETLKETMTELNQDKLKTDDIEDVINDAYTSPSNKKALRQVLRVVEDIKHAANGQDPSWLFIETADGTGTAGKRTQSRQKQIQTVYANAAQELIDSAVRGELEDKIADKASFTDRLVLYFMQGGRDIYTGAPLNIDQLSHYDIDHILPQSLIKDDSLDNRVLVNATINREKNNVFASTLFAGKMKATWRKWHEAGLISGRKLRNLMLRPDEIDKFAKGFVARQLVETRQIIKLTEQIAAAQYPNTKIIAVKAGLSHQLREELDFPKNRDVNHYHHAFDAFLAARIGTYLLKRYPKLAPFFTYGEFAKVDVKKFREFNFIGALTHAKKNIIAKDTGEIVWDKERDIRELDRIYNFKRMLITHEVYFETADLFKQTIYAAKDSKERGGSKQLIPKKQGYPTQVYGGYTQESGSYNALVRVAEADTTAYQVIKISAQNASKIASANLKSREKGKQLLNEIVVKQLAKRRKNWKPSANSFKIVIPRFGMGTLFQNAKYGLFMVNSDTYYRNYQELWLSRENQKLLKKLFSIKYEKTQMNHDALQVYKAIIDQVEKFFKLYDINQFRAKLSDAIERFEKLPINTDGNKIGKTETLRQILIGLQANGTRSNVKNLGIKTDLGLLQVGSGIKLDKDTQIVYQSPSGLFKRRIPLADL

SEQ ID NO: 123 - protein, 1234 aa, Prevotella tannerae
MPNFWSIFTENLQTYLMKTRILGLDTGTNSLGWAVVDRDENNQYTPICRGDLIFTEGVKQEKGIEFSLAAERTSYRASRRHYFRRRLRKVEVLKVLVKHKLCPPLSDEALNRWHTKKEYPLDEDFILWQRTNEADNKNPYHDRHICLHRKLNLKDSQTDRYTLGRALYHLTQRRGFLSNRLDQNEEAEETGKVKSAISELSKEMKEAGCEFLGDYFYLLYRTEGNRVRIRSRYTDREKHYLQEFKEICRVQELDEDLAKALEKTIFFQRPLKSQRQGVGKCTMEKGHSRCAVSHPLYEEYRLLCYLNNIRIKTPSDDRLRPLNAEEREKITPLFYKEKNFDFEKIAKKLAGKTPFGWIRDAEDWPYQFNYRMTQEAPACPTTAQLIKVFGEDWKAALAETYTMSAKQDGTLKTEDEICTDIWNVLYSFSSKEKLKEFGLKKLQLDEVQAKAFSEIRLTRDFASLSLKAIRKILFFLRTGEDYSKAIFLANIPTIVGEEIWNDIERRSRLLYKVDLALRPQEERDAEEHRTIAERIKAAVAAEVPDAPIDLLYHPSMIEAYPDAKRNERFDCYQLGSPKTNAVRNPMAMRSLHMVRKVINHLLRKHIIDEKTEIHIEYARELNDANKRQAIADWQRELSKRHTAYAQNIRQLYKAETGLVIEPTKADILKYQLWEEQQHVCLYTGKKIGIADFLGANPKFDIEHTIPRSRGGDSTQENLTLCESKFNRDIKRDKLPTELANYEEILARIEHWKKQCYALKLKRDGIRTHSGLEKSIKDSRIRRRHLVGLEYGYLKGKYDRFTMKEVPEGFSRRQGAGIGLISKYAGLFLKSLFKDPKNPNRSNVYVVKGAITAEFRKLWGLQQADEAKSRENHTHHCIDAYTIACIGPCEYAALAAYYRSDEEFKYGRRREKPQFEKPWPTFTEDLLKLQEELLIVHQTTDKLGKRDRRKVKTPRGKFLTGGDSARGRLHQETYYGAINYDGNIKYVVRKPLDSLTEKDLDKIVDETVMGIVKGAVEAKGSLKEALADGIYMNKEKGILIKRVRIFSDVSEPINLKQLRDVSTKEYKRHIHLRKDENYLFAIYEGIDKKKNKKQTETATVDYLDAAKFYKDSKRRDKANSLVGDYSKKNKLPLKCILKKRQMVLFYEHSPEEIRFKDKKDLSRRLYIVTSIAKDGRVKFLHHQAATATGIQSSPSPFTNDGEHQPYYRLSASNIKVLVAGIDFDINILGEITPKL

SEQ ID NO: 124 - protein, 1496 aa, Prevotella veroralis
MKTILGLDLGTNSIGWAKVCVDDNGNYLRDIKLGSRIIPMSQDVLGNFDKGVTESQTSVRTGFRGVRRIRERSLLRRERLHRVLHVLGYLPPHYDSAIGWNKNEPSTYGKFLNHGEPKLAWEHKEDGSMRFLFMESFHEMMADFAKSQPSLVSDGKKIPLDWTIYYLRKKALSQPIRKEELAWLLLNFNQKRGYYQLRGEEDDDNPTKCEEYYELKVVGIEADEEGKNGNTWYNVKLENGWIYRRQSKIPLDDWIGKVREFIVTTEYEKDGITLKKDKNGDVKRSFRSPSEDDWGLRKKRTEKLLDSSKMTVGAFVYDHLLAEPSDKIRGKFIRTIERKYYKKELYAILCEQSKYHEELRSGDYLNKCAEELYKNNQPHRNSLLTKDLAYLLLEDLIFYQRPLKTKKSLIAECPYEAYKYVDKETGEIKRQGIKCIAKSNPYYQEFRLWQFISNLRLFNKADDKEVTADYLPTQDDYVRLFAYLNDRKEINQETLLKEFFKLKKITVNSEKVFPIRWNYIEDKEKKYPCNETRHELLLALDRARIDHSWLEKPGQEYRLWHLLYSVESKEETKEALRKLKDDDAFVESFLKVKPFKREYGAYSEKAIKKLLAVMRMGSLWRETDICDTTKGNITKILQGEIDEKLKEKISASVSSYNQLSDFQGLPVWLACYVVYGRHSEAAEIQHWKTPESLLAYINGFKQHSLRNPIVEQCILETLRTVHDIWKEVGHIDEIHVELGRNMKSTADQRARISENVLRNENTNLRIKSLLLELKNDPNIKDVRPYSPMQQEKLRIYEEGVLQELTKDDKDFTEITKISTMAQPSAKELQRYKLWLEQKYRSPYTGKSISLTKLFTSAYQIEHVIPQSRYFDDSFSNKVICESEVNSLKDNMLGYEFIKNHGGEIIHCTMLGDVKVLSESEYKAFVNDHYAHNKRKRENLLLEDIPQEFLNRQMNDSRYISKVVKALLSNIVRAEGEEEATSKFVVSCSGGITDRLKKDWGLNDVWNKIVYPRFERLNRLTGTEAFGQWENKDGKRVFQTAVPLELQRGFNKKRIDHRHHAMDALVIACTSRNIINYLNNESANNPKKREDLRQKLCDKNRTIRKPWETFTQDATAALEDVIVSFKNYVRIINKATNYYERYDVEGKKVIAEQRGDDMWAIRKPMHEATYYGRVNLRRKKKVNLRVALENISSICDNKLRIYINGLVEKGFNTKQILDKFKNTNDHFSMQKIDKVEIWQFTNEEEKLVATRKPLDTSFDTKKIASITDTGIQTILLNYLETKGGDSTIAFTPEGIVEMNQNISKYNNGKEHMPILKVRLYTKLGKKIPVGQTGCKAKQFVIAEAGTNLYFAIYEDEEGKRSYRTIPLNEVVERLKQGLSPVPEKNDKDVHLKFYLSPNDLVYVPIEDEHESLAKDHIYKFVDSSGTTANFIPHRSANVIFELNKKDAEKFCSGSIIQNEYGVGSSQSKNQKAITGEMIKAVCRKLEVDRLGNVIKVI

SEQ ID NO: 125 - protein, 1082 aa, Neisseria cinerea
MAAFKPNPMNYILGLDIGIASVGWAIVEIDEEENPIRLIDLGVRVFERAEVPKTGDSLAAARRLARSVRRLTRRRAHRLLRARRLLKREGVLQAADFDENGLIKSLPNTPWQLRAAALDRKLTPLEWSAVLLHLIKHRGYLSQRKNEGETADKELGALLKGVADNTHALQTGDFRTPAELALNKFEKESGHIRNQRGDYSHTFNRKDLQAELNLLFEKQKEFGNPHVSDGLKEGIETLLMTQRPALSGDAVQKMLGHCTFEPTEPKAAKNTYTAERFVWLTKLNNLRILEQGSERPLTDTERATLMDEPYRKSKLTYAQARKLLDLDDTAFFKGLRYGKDNAEASTLMEMKAYHAISRALEKEGLKDKKSPLNLSPELQDEIGTAFSLFKTDEDITGRLKDRVQPEILEALLKHISFDKFVQISLKALRRIVPLMEQGNRYDEACTEIYGDHYGKKNTEEKIYLPPIPADEIRNPVVLRALSQARKVINGVVRRYGSPARIHIETAREVGKSFKDRKEIEKRQEENRKDREKSAAKFREYFPNFVGEPKSKDILKLRLYEQQHGKCLYSGKEINLGRLNEKGYVEIDHALPFSRTWDDSFNNKVLALGSENQNKGNQTPYEYFNGKDNSREWQEFKARVETSRFPRSKKQRILLQKFDEDGFKERNLNDTRYINRFLCQFVADHMLLTGKGKRRVFASNGQITNLLRGFWGLRKVRAENDRHHALDAVVVACSTIAMQQKITRFVRYKEMNAFDGKTIDKETGEVLHQKAHFPQPWEFFAQEVMIRVFGKPDGKPEFEEADTPEKLRTLLAEKLSSRPEAVHKYVTPLFISRAPNRKMSGQGHMETVKSAKRLDEGISVLRVPLTQLKLKDLEKMVNREREPKLYEALKARLEAHKDDPAKAFAEPFYKYDKAGNRTQQVKAVRVEQVQKTGVWVHNHNGIADNATIVRVDVFEKGGKYYLVPIYSWQVAKGILPDRAVVQGKDEEDWTVMDDSFEFKFVLYANDLIKLTAKKNEFLGYFVSLNRATGAIDIRTHDTDSTKGKNGIFQSVGVKTALSFQKYQIDELGKEIRPCRLKKRPPVR

SEQ ID NO: 126 - protein, 1512 aa, Fibrobacter succinogenes
MKKILGLDLGTNSIGWAVVNADEITRDDGSRYLKPNGISAAGSRIIPMSADILGDFEKGNSISQTAERTRMRMARRLHERALLRRERLLRVLNLLDFLPKHFADKIDRYGKFTDDSEPKLAWRKNTEGKYEFIFQDAFNEMLAEFKDKQPEIVEEGKKIPYDWTIYYLRKKALEKALSKEELSWILLQFNQKRGYYQLRGEEEEIPQDKKIEYLAQKVVKVEATDQKKGDDVWYNVYLENGMIYRRTSKAPLDWEGKVKEFIVTTEVENDGETPKKDKEGNIKRSFRAPKEDDWTLLKKKTEADIENSHKTVGCYIYDSLLNNPKQKIIGKLVRTVERKFYKEELTQILKKQVELIPELRDDNLYKQCIEELYPINEAHRNTIAKTDFANLFINDILFYQRPLKSKKSQIDNCPYEERIFIDSKTGEKKKVPVKCIAKSNPLFQEFRLWQFIQNLRIYQREKEIDGKLLTDIDITSECLKSEEDYVRLFDWLNDRETIEQEDLLKHLFNTKKSKNKENPYRWNYVEDKVYPCNETRATILKGFSKCGINASVLSPELEMALWHILYSVEDKKEIETALTHFAQKQGWNDDFAKVFSKAKPFKKDYGSYSEKAIKKLLSLMRMGKYWNQDNIDKNTLDRIDKIINGEYDEKISNRVRDNAINLKDISDFRGLPVWLACYIVYDRHSEAKDCTKWNSPEEIDSYLKKFKQHSLRNPIVEQVVTETLRTVRDIWIQEEQIDEIHLELGRDLKNPADKRKKMSENILKNENTNLRIKAMLMEFMNPSMGIENVRPYSPSQQDILRIYEENALDNLTKDDKDFDFISKISKQAQPSKTDIIRYKCWLEQKYRSPYTGKTISLSKLFTPAYEIEHVIPQSLYFDDSFSNKVICEAEVNKLKDRQLGYKFIAEHHGEKVQLSQGEVVEILSVDAYEKFVKENYANNRIKMKKLLMESIPDEFIERQLNDSRYISKVVKGLLSNIVREKIDDENYEPEAVSKNLISCNGAITDRLKKDWGMNDVWNSIILPRFIRMNQITGKDCFTTTNAEGHLIPQMPLELQKGFNKKRIDHRHHAMDAIVIACTTRDHVNLLNNEAAHSKFNATRYQLQRKLRRFEKAVIDGKEREVAKEFLKPWDSFSSDSKNILENIIVSFKQNQRVINKTTNAFLHFDENGKKTFIKQGKGDSWAIRKSMHKDTVFGEINLRKVRSVSLNEAIKVPERVLNKKIKEKILELKNNKIDAKNIKKYIEENHTGGYGIDSSKIDVFYFTKETKERFFATRKTLDTSFNQAKIKDSIADSGIQKILLAHLKSKNGDAEQAFSPDGIDEMNKNIVELNNGKFHQPILKVRVYEKADKFAVGQKGNKKVKFVEAAKGTNLFFAIFEKDGKRSYLTIPLNVMIDCQKQYGNQWKNNIEAYLKEKELVEKDVKLQFILSPNDLVYLPTEGSIDKKRIYKVVSFTNNRLYAIPYAIAKSIVDKNEFTQLNKIEFTDNKESIKDACVPVIIDRLGNVIEFNGKRL

SEQ ID NO: 127 - protein, 1259 aa, Streptobacillus moniliformis
MKYILGLDLGVASIGWAVTEINEKGEPVGLIDANSVIFKPLDNDKGKLYNVERRDKRGSRRILRRKKHRVERTKMLLVNSSFLTNEEIDNLYVGKLDNIYEVRLKGLKEQLSKNEIARLMIYYCKNRGFKSNRKTEDLEILKSLGEKISEKDSDEKKLKPIIAKNTELIESKGLTPIEVIYMIRENDNSILGFKNKEGNYKFGFKRNQVIDEVRKILGTQQILSKEIVDEYIDILSSQRDFSDGPGGDSKYKIDYTKLAGKCKYTGEVRAVKSAPSYEIFTMLQKLNDIRYVKFTSEDKIEKKKLSKEVIHKLYDLVVEKNKTLTYDLIEKSIDEENIKLLNIPKLSKSKYVELRKSYFKERNDNENLTEEEINAFNEKLNNERMKQELIRNNLKAYKELKSKFKKNNIDENRIKELGGIYFLDLVAELLTYSKTDEKLEYFVENVERYSLFKEQRDIVEIIKTFPNYTKNGNLSLSLVRELNKLLMEGHDYESSLSSLNYYIDTDVDWEKFPTISEIEDSLSTKITNPNVKHILVILRKLYNTLLFKYGRPEKVHLELSRDFSNDFSTRNKIQKEQLENKVRREVAAFEMYGANKDIVAGKDRLSNDDFVRIKLWEEQNKVCMYSGRTIEKYQLTSAEVQIDHILPYSKSFDNSYSNKVLVFSNENQDKKERTPYQWLKGTEKWNEFKQRVRLNLNISNKKKENLLFEDEVVNNEFLERELHATSYSSRLALNIFQRLIPVSDEDKYDEHGNEKVKYLYNRNVIAFQGKMTSMLRNLYSLNKYTHSFESDTLDIDNKAFILKEFEINKDNLKMTAYNVNTGLEITSETKVEKNKSGEFKTIKDELLKKELDKKENLIEISDYFKDKVLFDLKIVDFEEIDTVEPEIISILYKMITALKEEVYSKNRENHLHHSLDAFLLTIMNRSMQMKLIKYNQLISVLKNKEIEIFNEEKGEYIDSKEFAEELQKQKIIDIDGNERGIKFNVNGKTHRLNLVKPYENFLDDIKNKIFDKRENNKLPYHVVKSKVSGALHAETILGESKGEITKRISVFDINYKNLGKIFDKDGSQKEIYETLVKWLEAKSKDYPKLKNGNIIKKVKIVDGNKDKLIKLGNKRYVEMGRTTVKILVLKKEAEEGLKFASIGRYKYNLLKSEKDVNISIWKDAIHFCKVRYNKLKENGYRLIHELIPGETIELELNKGNISKCLVVGFSGGKIEISSVIGDALDLINDKISTRIKERYYITVSTIKSIKKINKNILGD

SEQ ID NO: 128 - protein, 1091 aa, Mobiluncus mulieris
MDSRKYRVGIDVGTNSVGFAAVEEDDSGSPTRFLNTMVVIHDSGVDPEQKKYAITRLASAGTARRTRRLYRTRRQRLRELDDFISNELGYPLVNLENFADPYEPWKVRADLATTKLPNDELPEAMSIALRHMARHRGWRSPYQRVEALHLHAEISKEFAALKERVVEKTGDVFSDDATPAEVLVDLMGRQKVRGADGVLSGKLRQSDNANELRKIASVQGIDDETLNRIIDRVFSSKSPKGKASERVGMDALPGQGSKPRALKAMPSFQKFRVVSVICNLRIKDSGGDARPLSMEEKEKLIDYLMSSTTDDHVTWTDVADLLHVKRSQLQGTAKEGFDGERPYTRPPVNSTWSKIKDSKIKSLVALWKTGDVDVQSAIVEALSNASVLEDSRPGADIVVAYLESLDDKELESLDKVGLPAGRASYSEDSLERLTERMLRDDCDLFEARKREFNVADDWKPPADPIYAPVGNPGVDRVLKIVNRLLMAAEREWGAPTQINIEHVRSGFSSELMQREFERENERRRAQNEEAVKAILTEKGGNSRVSKYDITRYYAVKRQHCQCLYCGTPITFSDCELDHIVPRKGVGSTNTRVNLAAACRSCNRDKSNLPFAVWAGKASNFDVSIDDAVSRVKQWQRSQNEGVREFRAFQNEVISRLLKTTEDPEIDSRSLESVAWMARELHHRVEYYFQSKGAQTQVSVYRGAVTAQARKSSGLEDKVKMIGGGGKTRLDRRHHAMDAATIALMTPGISTTLSEKNNLRDAQKFTGQSETWKDYCGRTETARKHFAVWKSNMERLTDLFNDKLENDAIPVVQPLRLRLSNSKAHDDGIGKLDSKKLGSVWSLADIDRAATPQIWTALTRCDDFDPTKGLPENANRVIRAQGVKYESEDNIPVFPSNVAAIAVRDGYAEIGSTIHHARIYRIDDGKKTFYSMIRVFAVDLLKHQAEDLFTVKLPPSAISIRTCEDSLRRALSNGTAEYLGWLVPGDEIIVDTSDKAFHTGQIGDLLRNFPVNSFRLTGFPSNSRLRLKPVLLAGEGLRDDAEDSIKKILLGQGWRPAINVLFSKGKPRIVRRNSLGIERPSSNNGLPFSWEA

SEQ ID NO: 129 - protein, 872 aa, Candidatus Parvarchaeum
MLGSSRYLRYNLTSFEGKEPFLIMGYYKEYNKELSSKAQKEFNDQISEFNSYYKLGIDLGDKTGIAIVKGNKIILAKTLIDLHSQKLDKRREARRNRRTRLSRKKRLARLRSWVMRQKVGNQRLPDPYKIMHDNKYWSIYNKSNSANKKNWIDLLIHSNSLSADDFVRGLTIIFRKRGYLAFKYLSRLSDKEFEKYIDNLKPPISKYEYDEDLEELSSRVENGEIEEKKFEGLKNKLDKIDKESKDFQVKQREEVKKELEDLVDLFAKSVDNKIDKARWKRELNNLLDKKVRKIRFDNRFILKCKIKGCNKNTPKKEKVRDFELKMVLNNARSDYQISDEDLNSFRNEVINIFQKKENLKKGELKGVTIEDLRKQLNKTFNKAKIKKGIREQIRSIVFEKISGRSKFCKEHLKEFSEKPAPSDRINYGVNSAREQHDFRVLNFIDKKIFKDKLIDPSKLRYITIESPEPETEKLEKGQISEKSFETLKEKLAKETGGIDIYTGEKLKKDFEIEHIFPRARMGPSIRENEVASNLETNKEKADRTPWEWFGQDEKRWSEFEKRVTSLYSKKKISERKREILLNKSNEYPGLNPTELSRIPSTLSDFVESIRKMFVKYGYEEPQTLVQKGKPIIQVVRGRDTQALRWRWHALDSNIIPEKDRKSSFNHAEDAVIAACMPPYYLRQKIFREEAKIKRKVSNKEKEVTRPDMPTKKIAPNWSEFMKTRNEPVIEVIGKVKPSWKNSIMDQTFYKYLLKPFKDNLIKIPNVKNTYKWIGVNGQTDSLSLPSKVLSISNKKVDSSTVLLVHDKKGGKRNWVPKSIGGLLVYITPKDGPKRIVQVKPATQGLLIYRNEDGRVDAVREFINPVIEMYNNG

SEQ ID NO: 130 - protein, 1229 aa, Pediococcus acidilactici
MGDRKYNLGLDIGTSSIGFAAVDENNQPIRVKGKTAIGVRLFEEGKTAADRRGFRTTRRRLSRRRWRINLLNEIFDAHLAEVDPTFLARLKESNRSNLDPKKSFQGSLLFPERKDYQFYEEYPTIYHLRKALMEKDRKFDIREIYLAVHHIIKYRGNFLNGTPMRSFKVENIELNTLFDQLNQLYAEIVPDNELAFDLAQVADVKDVLSSTTIYKMDKKKQLVKMMLLPASNKALQSENKKIVTQFVNAILNYKFKLDVLLQVETDADWSLKLNDEGADDKLEEFTGDLDENRLEIIDLLQRLHNWFSLNEITKDGNSLSAAMVEKYENHHHHLGLLKKVIENHPDAKKAKALKETYTAYVGKTDDKTQNQDDFYKAVEKNLDDSPDAKGIKRLIQLDQFMPKQRTGQNGAIPHQLHQQELDQIIEKQSKYYPFLAEPNPNVKRRKDAPYKLDELIAFKIPYYVGPLVTPEEQAQNKENVFAWMKRKAAGPITPWNFDEKVDRMESANRFIRRMTTKDTYLFGEDVLPAESMIYQKFVVLNELNNLKINGRHLSLKDKQDVYNDLFKQQKTVSIKALQNYYVTKKKAATAPTVGGLADPKKFLSSLSTYIDFKNMFGERVNDPQFQEDLEQIVEWSTIFEDRGIFKAKLQALGWLSEKQIQQLVAKRYKGWGRLSKKLLTGLKNAEGYSILDEMWRSTENFMQIQSRPEFAALIQQANEKQFEGNDPDNVWENIENILGDAYTSPQNKKAIRQVVKVVQDIEKAVGNPPEKIAIEFTREAAANPQRTQSRLRTLEKLYESAEEVVDAGLTAELAEFKENKHVLSDKYYLYFTQLGRDVYTGDTISLDKLNDYDVDHILPQSFIKDDSLDNRVLTIRAVNNGKSDNVPAKMFGKKMGSFWRHLLDNGMISKRKYNNLITDPDNISKYAQKGFINRQLVETSQVIKLTANILNGIYDKDTEIIEVPAKMNSQMRKMFDLVKVREVNDYHHAFDAYLTIFIGNYLYKCYPKLRPYFVYDNFKKFGNKEDIGHKRFNFLGKIEREKKVVAPETGEILWSNVAPNETIKQIKKVYNYKFMIVSREITTRRAELFNQTVYPKNYRGKLIPIKEDRPTDLYGGYSGNTDAYLAIVALEDKKKGKYFKVVGIPTRAAAKLEKLKQQDSQQYLQALHEVIAPQFTKSTKKGIKKTEFEIVLDKVHYRQLVQDGPVKMMLGSSTYKYNAKQLVLSEKAL

SEQ ID NO: 131 - protein, 1398 aa, Veillonella parvula
METQASNQLISSHLKGYPIKDYFVGLDIGTSSVGWAVTNKAYELLKFRSHKMWGSRLFDEGESAVARRGFRSMRRRLERRKLRLKLLEELFADAMAQVDPTFFMRLRESKYHYEDKTTGHSSKHILFIDKNYNDQDYFKEYPTVYHLRSELMKSGTDDIRKLFLAVHHILKYRGNFLYEGATFDSNASTLDDVIKQALENITFNCFDCNSAISSIGQILMEAGKTKSDKAKAIEHLVDTYIATDTVDTSSKTQKDQVKEDKKRLKAFANLVLGLNASLIDLFGSVEELEEDLKKLQITGDTYDDKRDELAKAWSDEIYIIDDCKSVYDAIILLSIKEPGLTISESKVKAFNKHKDDLAILKSLLKSDRSIYNTMFKVDEKGLHNYVHYIKQGRTEETSCNREDFYKYTKKIVEGLSDSKDKEYILSQIELQILLPLQRIKDNGVIPYQLHLEELKAILAKCGPKFPFLNEVADGFSVAEKLIKMLEFRIPYYVGPLNTHHNVDNGGFAWAVRKASGRVTPWNFDDKIDREKSAAAFIKNLTNKCTYLLGEDVLPKSSLLYSEFMLLNELNNVRIDGKPLEKVVKEHLIEAVFKQDHKKMTKNRIEQFLKDNGYISETHKHEITGLDGEIKNDLASYRDMVRILGDGFDRSMAEEIITDITIFGESKKMLRETLRKKFASCLDDEAIKKLTKLRYRDWGRLSQKLLNGIEGCDKAGDGTPETIIILMRNFSYNLMELLGDKFSFMERIQEINAKLTEGQIVNPHDIIDDLALSPAVKRAVWQALRIVDEVAHIKKALPARIFVEVTRSNKNEKKKKDSRQKRLSDLYAAIKKDDVLLNGLNNEIFGELKSSLAKYDDAALRSKKLYLYYTQMGRCAYTGEIIELSLLNTDNYDIDHIYPRSLTKDDSFDNLVLCKRTANAQKSDAYPISEEIQKTQKPFWTFLKQQGLISERKYERLTRITPLTADDLSGFIARQLVETNQSVKAATTLLRRLYPGVDVVFVKAENVTDFRHDNNFIKVRSLNHHHHAKDAYLNIVVGNVYHERFTRNFRAFFKKNGANRTYNLAKMFNYDVNCTNAKDGKAWDVKTSMDTVKKMMDSNDVRVTKRLLEQTGALADATIYKATVAGKAKDGAYIGMKTKSSVFADVSKYGGMTKIKNAYSIIVQYTGKKGEVIKEIVPLPIYLTNRNTTDQDLINYVASIIPQAKDISIIYGKLCINQLVKVNGFYYYLGGKTNSKFCIDNAIQVIVSNEWIPYLKVLEKFNNMRKDNKDLKANVVSTRALDNKHTIEVRIVEEKNIEFFDYLVSKLKMPIYQKMKGNKAAELSEKGYGLFKKMSLEEQSIHLIELLNLLTNQKTTFEVKPLGITASRSTVGSKISNQDEFKVINESITGLYSNEVTIV

SEQ ID NO: 132 - protein, 1485 aa, Prevotella bivia
MKNILGLDLGTNSIGWAKISIDDNGKYIKDSIKLGSRIIPMSQDVLSNFSKGVTLSQTSERTSFRGARRLRERTLLRRERLHRILHLLGFLPKHYEKAIGWDRNDNKTYGKFINHAEPKLAWCKDNNGKMRFLFMDSFHDMLSEFSEKHPELLANGKKIPLDWTIYYLRKKALYKAITKEELAWILLNFNQKRGYYQLRGEEDRDSEANKKEYLELKVIGVEATGEKKGNDIWYNIHLENGWIYRRSSKNPLNDWLGKVKSFIVTTDLDADGNPKKDKDGNIKRSFRAPSEGDWTLIKKRTESLLENSGQTVGQFIYNHILEEPSAKIRGNFIRTIERKYYKDELKAILEKQKEFHHELSSESLLTECAKELYKRNIAHQEVLLKKGIIHLLLNDILFYQRPLKIKKSLIDNCPYENYKYVDKKSGDIKVKSIKCIAKSNPFFQEFRLWQFVSNLRLYRKSDDKDVTSEHLVTTDDYANLFTYLNNRKDIKQSVLLKEYFKIKKVKTINGAEYPVRWNYIDDDNKTYPCNETRYDILHALSKTELKSEWLTPERTYRLWHLLYSIESKEETKKALNKLNLSDDFTEAFLTIKPFKKEYGSYSEKAIKKLLSLMRMGYLWSEDEAIKQVGAEIEKTIEGELPDYVLQRLEKSQHNYNKISDFSGLPLWLASYIIYGRHSEAKEIIHWDNPESMMAYIKDFRQHSMRNPIVEQCVLETLRTVHDIWKEIGHIDEIHIELGREMKSTSEQRKAITQNVLHNQNTNIRIKLLLQELKNDNNITGVRPYSPMQQEILRIYEEGALQGLTKEDKDYNDILKISQTAQPTSNELTRYKLWLEQKYRSPYTGKAISLSKLFTSAYQIEHVIPQSRYFDDSLSNKVICESEVNTLKKAMLGMEFIKTCGGQKVHCTLLGDVEIYNEEDYKAFVNEHYSNNRTKRNKLLMEDIPQEFINRQLNDSRYISKMVKQLLSAIVRGQEEVEATSKFVIPCTGGITDRLKKDWGLNDIWNNLVSPRFQRMNALTGSEYFGHWENKEGKRVFQTTMPIQLQQGFSKKRIDHRHHAMDALVIACASRNIISYLNNETAQDTERRRDLRQKLCDKGGSVRKPWDSFTQDTQYALKDIIVTFKNYVRIINKATNYYEHYKTDGKKGMISQKGDELWAIRKPMHKETVFGKVNLRRPKRVSLSKAIDSVDIICNRKLKKYIKARLNEGLQKKQILNIFKELNNVWEGIDVNKIDIWEMSNDKEPMVATRKQLDTSFDEKKIRSISDTGIQKILLNYLITKNNNPELAFTPEGIQEMNSNISEYNDHKKHQPIYKVRVTEPLGAKYPIGTMGNNPKKFVEAQAGTNLYFAIYEDKEGKRNYDTIPLNIAAERLNQQLSPVPETNENNTPLKFYLSPNDLVYVPSEEERHSGNNIQLDKNRIYKMVSSTSKRCFFIHHRVAISLVDKKEFSAQNKMERSIDNEQVMIKSVCWKLITDRLGNIIKVIK

SEQ ID NO: 133 - protein, 1218 aa, Prevotella buccalis
MNKRILGLDTGTNSLGWAVVDWDEHAQSYELIKYGDVIFQEGVKIEKGIESSKAAERSGYKAIRKQYFRRRLRKIQVLKVLVKYHLCPYLSDDDLRQWHLQKQYPKSDELMLWQRTSDEEGKNPYYDRHRCLHEKLDLTVEADRYTLGRALYHLTQRRGFLSNRLDTSADNKEDGVVKSGISQLSTEMEEAGCEYLGDYFYKLYHEQGNKVRIRQRYTDRKKHYQHEFDAICEKQELSSELIEDLQRAIFFQLPLKSQRHGVGRCTFERGKPRCADSHPDYEEFRMLCFVNNIQVKGPHDLELRPLTYEEREKIEHLFFRKSKPNFDFEDIAKELAGKKNYAWIHDKEERAYKFNYRMTQGVPGCPTTAQLKSIFGDDWKTGIAETYTLIQKKNGSKSLQEMVDDVWNVLYSFSSVEKLKEFAHHKLQLDEENAEKFAKIKLSHSFAALSLKAIRKFLPFLRKGMYYTHASFFANIPTIVGKEIWNNEQSRKYIMENVGELVFNYQPKHRDVQGTIEMLIKDFLANNFELPAGATDKLYHPSMIETYPHALRNEFGILQLGSPRTNAIRNPMAMRSLHVLRRVVNQLLKESIIDENTEVHVEYARELNDANKRRAIADRQKEQDKQHKKYGDEIRKLYKEETGKDIEPTQTDVLKFQLWEEQNHYCLYTGEQIGITDFIGSNPKFDIEHTIPQSVGGDSTQMNLTLCDNRFNREVKKAKLPTELANHEEILTRIEPWKNKYEQLVKERDKQRTFAGMDKAVKDIRIQKRHKLQMEIDYWRGKYERFTMTEVPEGFSRRQGTGIGLISRYAGLYLKSLFHQADSRNKSNVYVVKGVATAEFRKMWGLQSEYEKKCRDNHSHHCMDAITIACIGKREYDLMAEYYHMEETFRQGRGSKPKFSKPWATFTEDVLNIYKNLLVVHDTPNNMPKHTKKYVQTSKGKVLAQGDTARGSLHLDTYYGAIERDGEIRYVVRRPLSSFTNPKELENIVDETVKRTIKEAIADKNFKQAIAEPIYMNEDKGILIKKVRCFANSVKQPINIRQHRDLSKKEYKQQYHVMNENNYLLAIYEGLVKNKVVREFEIVSYIEAAKYYKRSQDRNIFSSIVPTHSTKYGLPLKTKLLMGQQVLMFEENPDEIQVDNTKDLVKRLYKVVGIEKDGRIKFKHHQEARKEGLTIYSTPYKNNDDYVPIFRQSIKNINILVDGIDFNIDILGKVTLKE

SEQ ID NO: 134 - protein, 1218 aa, Prevotella timonensis
MNKRILGLDTGTNSLGWAVVDWDEHAQSYELIKYGDVIFQEGVKIEKGIESSKAAERSGYKAIRKQYFRRRLRKIQVLKVLVKYHLCPYLSDDDLRQWHLQKQYPKSDELMLWQRTSDEEGKNPYYDRHRCLHEKLDLTVEADRYTLGRALYHLTQRRGFLSNRLDTSADNKEDGVVKSGISQLSTEMEEAGCEYLGDYFYKLYDAQGNKVRIRQRYTDRNKHYQHEFDAICEKQELSSELIEDLQRAIFFQLPLKSQRHGVGRCTFERGKPRCADSHPDYEEFRMLCFVNNIQVKGPHDLELRPLTYEEREKIEPLFFRKSKPNFDFEDIAKALAGKKNYAWIHDKEERAYKFNYRMTQGVPGCPTIAQLKSIFGDDWKTGIAETYTLIQKKNGSKSLQEMVDDVWNVLYSFSSVEKLKEFAHHKLQLDEESAEKFAKIKLSHSFAALSLKAIRKFLPFLRKGMYYTHASFFANIPTIVGKEIWNKEQNRKYIMENVGELVFNYQPKHREVQGTIEMLIKDFLANNFELPAGATDKLYHPSMIETYPNAQRNEFGILQLGSPRTNAIRNPMAMRSLHILRRVVNQLLKESIIDENTEVHVEYARELNDANKRRAIADRQKEQDKQHKKYGDEIRKLYKEETGKDIEPTQTDVLKFQLWEEQNHHCLYTGEQIGITDFIGSNPKFDIEHTIPQSVGGDSTQMNLTLCDNRFNREVKKAKLPTELANHEEILTRIEPWKNKYEQLVKERDKQRTFAGMDKAVKDIRIQKRHKLQMEIDYWRGKYERFTMTEVPEGFSRRQGTGIGLISRYAGLYLKSLFHQADSRNKSNVYVVKGVATAEFRKMWGLQSEYEKKCRDNHSHHCMDAITIACIGKREYDLMAEYYRMEETFKQGRGSKPKFSKPWATFTEDVLNIYKNLLVVHDTPNNMPKHTKKYVQTSIGKVLAQGDTARGSLHLDTYYGAIERDGEIRYVVRRPLSSFTKPEELENIVDETVKRTIKEAIADKNFKQAIAEPIYMNEEKGILIKKVRCFAKSVKQPINIRQHRDLSKKEYKQQYHVMNENNYLLAIYEGLVKNKVVREFEIVSYIEAAKYYKRSQDRNIFSSIVPTHSTKYGLPLKTKLLMGQLVLMFEENPDEIQVDNTKDLVKRLYKVVGIEKDGRIKFKYHQEARKEGLPIFSTPYKNNDDYAPIFRQSINNINILVDGIDFTIDILGKVTLKE

SEQ ID NO: 135 - protein, 1487 aa, Prevotella timonensis
MKNILGLDLGSNSVGWALVKVEENGNPIGSIKMGSRIIPMSQDILGSFEKGDTVSQTAQRTLYRGKRRLIERHVLRRERLCRVLHIMNFLPAHFDRLLGWDKTDNKTYGKFIDDSEPKLAWRQNKNEMGKMEFVFMDSFHEMLSDFAKHQPQLIANGKKVPLDWTIYYLRKKALTQLISKEELAWILLNFNKKRGYYQLRGEEEEEQPTKKEEYKVLKVISVDADEGQKGNGIWYNIHLEDGGIYKKKSDIPLYDWVGKTLQLIVVTTYEKDGKTPKIFDSGKQNPSYRLPKEDDWGLVKKRTESQLQSSGKTVGAFIYDNILSKPDDKIRGNLVRTIERKYYKKELIEILQQQAKYHDELHNQNLLESCAKELYAHNDVHYNEVIKSNMINLLVNDIIFYQRPLKSKKSLIANCKYESYEYVDKETGEIKEMPIKCIAKSNPYYQEFRLWQFIHNLRLSDVVTREDVTAQYLSTPQDYCNLFTYLNDRKEIKQDILLKDFFKIKKVQIDKEKVFPIEWNYIKDATKSYPCNETRYELLSALKRAGMDKQWLDDTPNMQYRLWHLLYSVEEKEESAKALRKLYDDDKFVTSFLKIKPFNKCYGAYSEKAIKRLLTLMRMGKAWNEQAIDAKTLKCIQQIITDNVDSKLKEKIDDSRYVLHHVSDFQGLPTYLASYVIYGRHSEVTDIQCWDSPEDLLKFIRDFKQHSLRNPIVEQVILETLRVVYDIWKAEKHIDEIHVEVAREMKLTAQQRNEANLRNLNNEATNLRIKYLLEELKNDTFIKDVRPLSPIHQEKMRIYEQAVLGNLNKQDKDYDDIIKISKKEHPTNAELIRYKLWLEQRYCSPYTGKAISLSKLFTTAYEIEHIIPQSRYFDNSFNNKVICEAEVNKAKGNMLGYEFIKKQGGQKIYCTQLGKAVTILKEEAYKQFVNEHYAHNKRKRDNLLAENIPESFSSRQLNDTRYITKTIMSLLSNVVRQQSEEEATAKNLLPSSGSVTDRLKNDWGLKDVWNTIVTPRFERLNKLSGTNDFGEMKEENGNRYFQTNVPLEYEKGFKKKRIDHRHHAMDALVIACTTRNMVNYISNANANSPKQREDLRQLLCDKNRIINKPWDTFTQDALKALNDIVVSFKNNVRIINRATNRYQRYDKNGKKIIFSQKGDDMWAIRKSMHKETVFGRVNLIRKEVLPIAKALDNISAICNAQLRAYVNDLVDKHFNKKQLVAHFKSLNYKWNRQDVSKVEVWISSDNKTPMVAVRKPLDTSFDKKKIASITDTGIQTILLNYLESKGGDASVAFAPEGIQEMNSNIELYNNGKAHKPIKNVRLSEPLGAKYQVGERGAKTKKYVEADKGTNLFFAIYEDEEGKRYYYSVPLREAIERQKQKLSPVPEYNEKGVALKFYLSPNDLVYVPTEEERTMGTCHIDKARIYKMVSSTGCSCYFVPSTFAKVIVDKVELQSLNKMEKAITDECIKEVCWKLKVDRLGNIINVIK

SEQ ID NO: 136 - protein, 1138 aa, Bifidobacterium dentium
MLCRCHRRYRIGIDVGLMSVGLAAIEVDETGFPIRILNIQSVIHDGGIDPQLGKKKSISRKAISGVARRTRRMRRRKVVRLRQLDATLESLGFPIVEPDSLDTWEIWLTRAKLASSYIQDDETRKEDVSIALRHIARHRGWRNPYSNVESLFVDVAPSEQYEELRRKAEEKLGTSLSGNPTSAEIVECILKRQVGEVQLRTRSRKGVNGNAVEKEGLLPTKLMQSDNAAEIRRIFKVQRIDDETGRKLLRAVFKACSPKGSVERRVGRDALAPGLPRALKASLAFQEYRIANVLTNLVISEDGTKRKLTIAEKQRVFGFLSSNETDDITWIDVAEKLGLERRQIQGVGCLTADGEERISSTPPRNITALHIHSAKPVIREKLVAWWKAASPTVRETMVELLSNTVDIDRVREDMDYSSAVAFIDSLGDEELTALDSVDLLSGRAAYSRQTLKQLTERMLNTDDDLHEARKAVFGVDDNWKPPVDAISTSVGNPAVDRVLKIVNRYLLACQKRWRNPQSVQIEHVRESFSSVAKAKETERVQGERARYRNDLRRELCEQEGLNKIRESDIRRWESVQRQNGTCLYCGSPITFRTCEMDHIVPRKGVGSTNTRVNLAAACAACNKLKSNTAFSVWARTEGAANRKVSQRDAIERVKTFIFNKSVPPREQRAFKQAVISRLRQAESDPAIDNRSIESVAWMADELHRRIEAYFNQDADVSGNTPATQVWVFQGRVTALARKASGIEGRIHFAGEWKKTRLDRRHHAVDAAVIAMMNHSAAQTLVERDSLRLSQWITRKPETWKNYPFSEGQKKTRFKEWLDCMNALLDLLNDALDSDRVPVTRCQRMSLGNSQAHAATIRKMKRVELFSPMDADLIRRASTPALYCALTRLPEYSPEKGLPENRGREIVLNGRHIRSTETVDFFASGAAQLMVRNGSAEIGDSIHHMRIYRYRKTGAKSQEYVYGMIRVFQIDLLHASSENLFAVQLPSQSVSVRYGDKNVVQAIQEGRAEYLGHIVPNDEILISYEGVRMKDSEKIGAYANDFSGTASELAQRRHWVVVGSDVSKLALRPSYLSEEGLENSGSESERLSKQTRKVIEGKGWVVAVNILAKYHPVVIRRNALGEPRFRTNSGMPVSWRWDR

SEQ ID NO: 137 - protein, 587 aa, Neisseria subflava
MATSRSRIRSQTDAFGVVGSLVAFNQTSRLFVAKKNEGETADKELGALLKGVADNAHALQTGNFRTPAELALNKFEKESGHIRNQRGDYSHTFNRKDLQAELNLLFEKQKEFGNPHVSDGLKEGIETLLMAQRPALSGDAVQKMLGYCTFEPTEPKAAKNTYTAGRFIWLTKLNNLRILEQGSERPLTTTERATLMDEPYRKSKLTYAQARKLLGLEDTAFFKGLRYGKDNAEASTLMEMKAYHAISRALEKEGLKDKKSPLNLSPELQDEIGTAFSLFKTDEDITGRLKDRVQPEILEALLKHISFDKFVQISLKALRRIVPLMEQGKRYDEACAEIYGDHYGKKNAEEKIYLPPIPADEIRNPVVLRALSQARKVINAVVRRYGSPARIHIETAREVGKSFKDRKEIEKRQEENRKDREKAAAKFREYFPNFVGEPKSKDILKLRLYEQQHGKCLYSGKEINLGRLNEKGYIEIDHALPFSRTWDDSFNNKVLVLGSENQNKGNQTPYEYFNGKDNSREWQEFKARVETSRFPRSKKQRILLQKFDEDGIYRIGVKTALSFPKYQIDELGKEIRPCRLKKRPPVR

SEQ ID NO: 138 - protein, 1269 aa, Mycoplasma gallisepticum
MNNSIKSKPEVTIGLDLGVGSVGWAIVDNETNIIHHLGSRLFSQAKTAEDRRSFRGVRRLIRRRKYKLKRFVNLIWKYNSYFGFKNKEDILNNYQEQQKLHNTVLNLKSEALNAKIDPKALSWILHDYLKNRGHFYEDNRDFNVYPTKELAKYFDKYGYYKGIIDSKEDNDNKLEEELTKYKFSNKHWLEEVKKVLSNQTGLPEKFKEEYESLFSYVRNYSEGPGSINSVSPYGIYHLDEKEGKVVQKYNNIWDKTIGKCNIFPDEYRAPKNSPIAMIFNEINELSTIRSYSIYLTGWFINQEFKKAYLNKLLDLLIKTNGEKPIDARQFKKLREETIAESIGKETLKDVENEEKLEKEDHKWKLKGLKLNTNGKIQYNDLSSLAKFVHKLKQHLKLDFLLEDQYATLDKINFLQSLFVYLGKHLRYSNRVDSANLKEFSDSNKLFERILQKQKDGLFKLFEQTDKDDEKILAQTHSLSTKAMLLAITRMTNLDNDEDNQKNNDKGWNFEAIKNFDQKFIDITKKNNNLSLKQNKRYLDDRFINDAILSPGVKRILREATKVFNAILKQFSEEYDVTKVVIELARELSEEKELENTKNYKKLIKKNGDKISEGLKALGISEDEIKDILKSPTKSYKFLLWLQQDHIDPYSLKEIAFDDIFTKTEKFEIDHIIPYSISFDDSSSNKLLVLAESNQAKSNQTPYEFISSGNAGIKWEDYEAYCRKFKDGDSSLLDSTQRSKKFAKMMKTDTSSKYDIGFLARNLNDTRYATIVFRDALEDYANNHLVEDKPMFKVVCINGSVTSFLRKNFDDSSYAKKDRDKNIHHAVDASIISIFSNETKTLFNQLTQFADYKLFKNTDGSWKKIDPKTGVVTEVTDENWKQIRVRNQVSEIAKVIEKYIQDSNIERKARYSRKIENKTNISLFNDTVYSAKKVGYEDQIKRKNLKTLDIHESAKENKNSKVKRQFVYRKLVNVSLLNNDKLADLFAEKEDILMYRANPWVINLAEQIFNEYTENKKIKSQNVFEKYMLDLTKEFPEKFSEFLVKSMLRNKTAIIYDDKKNIVHRIKRLKMLSSELKENKLSNVIIRSKNQSGTKLSYQDTINSLALMIMRSIDPTAKKQYIRVPLNTLNLHLGDHDFDLHNMDAYLKKPKFVKYLKANEIGDEYKPWRVLTSGTLLIHKKDKKLMYISSFQNLNDVIEIKNLIETEYKENDDSDSKKKKKANRFLMTLSTILNDYILLDAKDNFDILGLSKNRIDEILNSKLGLDKIVK

SEQ ID NO: 139 - protein, 1354 aa, Prevotella melaninogenica
MADFAKYQPGMVADGRKIPLDWTLYYLRKKALTQAIRKEELAWILLNFNQKRGYYQLRGEEEEENSTKHEEYYELKVVSVEAAEEGKGGNTWYNVTLENGWIYRRQSKIELNDWVGKVRPFIVTTEYEIDGVTIKKDKNGEVKRSFRAPSENDWGLRKKRTESLLEESGKTVGAFIYNHILSEPADKIRGNFIRTIERKFYKKELEAILREQSKHQKELKDIDTLIACIKELYPNNKPHQDSLIKKDMTYLLITDLIFYQRPLKSKKSLIADCPYEYYEYVIKETGENKRQSIKCIAKSNPYYQEFRLWQFIINLRLFDRNNDKEVTSEYLSSMEDYTRLFTYLNDRKDINQETLLKDFFKQKKVKRGMEKEFPIRWNYIEDKEKKYPCNETRHELLTALGKVGIDHSWLDDKELFYRLWHLLYSVESKEEAEGALRKLVDNDDFVNAFLKIKPFKKEYGAYSEKAIKKLLAVMRMGNLWNEVDICEQTRDRIQNIIKGDIDEKIKDRMGRTFSQLSDFQGLPEWLACYVVYGQHSEATDIQRWTKPENLMAYINGFKQHSLRNPIVEQCILETLRTVHDIWKEAGHIDEIHIELGRGMKSTADQRARMSKSIMQNENTNLRIKSLLMELKNAKEFENVRPYSPMQQEILRIYEEGALQELTKEDAQYNEISKISQMAQPSANELLKYRLWLEQKYCSPYTGKPISLSKLFTSAYQIEHIIPQSRYFDDSFTNKVICEAEVNQLKSNMLGYEFIKKHGGEIVRCTMIGDVKLLDAKEYYNFVTEHYTNNRRKKEKLLMEDIPQEFLNRQMNDSRYISKKVMAILSNIVREEDEQEAKSKFVIACSGGITDRLKQDWGLNDVWNSIVYPRFERLNKLTNTENFGRWENKKGKQVFQTSVPLELQKDFSKKRIDHRHHAMDALVIACASNNIINYLNNESAKSQEKREDLRKKLCDKNRIIRKPWETFTQDAHTALENVVVSFKNYIRVINKATNYYEKYDKNGKKEIAEQKGQDMWAIRKPMHKETVFGQVNLRRKITIKLKDALEKIPAICDKELRDYINILVAKQFNKKQILAHFKSINYRLNMKSVDKVDVWQFSNEKEPMVATRKSVDTSFDTKRIATITDTGIQKILLNYLKAKNNDPNIAFTPEGIAEMNKHITEYNNGKQHQPILKVRVSEPKGAKYQVGETGNKRSKFVEAQKGTNLYFAIYEDKEGNRSYNTIPLNEVIERLKQGLSPVPDANEKSIPLKFHLSPNDLVYVPKTDEENEIKMGQIYKFVDSSGTTANFVPHRVSNLIYNVDKKIAENFCNHEIIQNEYGIGSPQSKNQKSITGEMIKAVCWKLEVDRLGNIHKIIK

SEQ ID NO: 140 - protein, 1130 aa, Streptococcus gallolyticus
MTNGKILGLDIGIASVGVGIIEAKTGKVVHANSRLFSAANAENNAERRGFRGSRRLNRRKKHRVKRVRDLFEKYEIVTDFRNLNLNPYELRVKGLTEQLTNEELFAALRTISKRRGISYLDDAEDDSTGSTDYAKSIDENRRLLKTKTPGQIQLERLEKYGQLRGNFTVYDENGEAHRLINVFSTSDYEKEARKILETQADYNKKITAEFIDDYVEILTQKRKYYHGPGNEKSRTDYGRFRTDGTTLENIFGILIGKCSFYPDEYRASKASYTAQEYNFLNDLNNLKVPTETGKLSTEQKEALVEFAKSTATLGPAKLLKEIAKILDCKVDEIKGYREDDKGKPDLHTFEPYRKLKFNLDSVNIDDLSREVLDKLADILTLNTEREGIEDAIRHNLPNQFTEGQISEIIKVRKSQSTAFNKGWHSFSAKLMNELIPELYATSDEQMTILTRLEKFKVNKKSSKNTKTIDEKEVTDEIYNPVVAKSVRQTIKIINAAVKKYGDFDKIVIEMPRDKNADDEKKFIDKRNKENKKEKDDALKRAAYLYNGTDKLPDEVFHGNKQLETKIRLWYQQGERCLYSGKPIPIQELVHNSNNFEIDHILPLSLSFDDSLANKVLVYAWTNQEKGQKTPYQVIDSMDAAWSFREMKDYVLKQKGLGKKKRDYLLTTENIDKIEVKKKFIERNLVDTRYASRVVLNSLQSALRELGKDTKISVIRGQFTSQLRRKWKIDKSRETYHHHAVDALIIAASSQLKLWEKQDNPMFVDYGNNQVVDKQTGEILSVSDDEYKELVFQPPYQGFVNMISSKGFEDEILFSYQVDSKYNRKVSDATIYSTRKAKIGKDKKEETYVLGKIKDIYSQNGFDTFIKKYNKDKTQFLMYQKDPLTWENVIEVILRDYPTTKKSEDGKNDVKCNPFEEYRRENGLVCKYSKKGKGTPIKSLKYYDKKLGNCIDITPEGSKNEVVLQSLNPWRADVYFNPETLKYELLGLKYSDLSFEKGTGKYHISQEKYDVIKEKEGIGKKSEFKFTLYRNDLILIKDTASGEQEIYRFLSRTMPNVKHYAELKPYDKEKFDNVQELVEALGEADKVGRCIKGLNKSNLSIYKVRTDVLGNKYFVKKEGDKPKLDFKNNKK

SEQ ID NO: 141 - protein, 1371 aa, Streptococcus gallolyticus
MTEKNYSIGLDIGTNSVGWAVITDDYKVPAKKMKVLGNTDKKYIKKNLLGALLFDNGETAEATRLKRTARRRYTRRKNRLRYLQEIFAEEMAKVDESFFYRLDESFLTTDDKDFERHPIFGNKADEIKYHQEFPTIYHLRKHLADSHEKADLRLIYLALAHMIKFRGHFLIEGELNAENTDVQKLFEAFVEVYDRTFDDSNLSEITVDASSILTEKFSKSRRLENLIKHYPTEKKNTLFGNLVALALGLQPNFKTSFKLSEDAKLQFSKDTYEEDLEELIGKIGDEYADLFTSAKNLYDAILLSGILTVADNTTKAPLSASMIKRYNEHQVDLKKLKEFIKNNASDKYDEIFNDKDKNGYAGYIENGVKQDEFYKYLKTTLSKIDGSDYFLDKIEREDFLRKQRTFDNGSIPHQIHLQEMHAILRRQGEHYAFLKENQAKIEKILTFRIPYYVGPLARKNSRFAWAEYHSDEKITPWNFDEIIDKEKSAEKFITRMTLNDLYLPEEKVLPKHSLVYETYTVYNELTKVKYVNEQGKSNFFDANMKQEIFEHVFKENRKVTKDKFLNYLNKEFPEYRIQDLIGLDKENKSFNASLGTYHDLKKILDKSFLDDKTNETIIEDIIQTLTLFEDRDMIRQRLQKYSDIFTPQQLKKLERRHYTGWGRLSYKLINGIRNKENGKSILDYLIDDGYANRNFMQLISDDTLPFKQIIKDAQIIGDIDDVTSVVRELPGSPAIKKGILQSVKIVDELVKVMGHNPDNIVIEMARENQTTNRGRNQSQQRLKKLQDSLKELGSNILNEEKPSYIEGKVENNHLQDDRLFLYYIQNGKDMYTGDELDIDHLSDYDIDHIIPQAFIKDDSIDNRVLTSSAKNRGKSDDVPSLDIVHDRKADWIRLYKSGLISKRKFDNLTKAERGGLTENDKAGFIKRQLVETRQITKHVAQILDSRFNTERDENDKVIRNVKVITLKSNLVSQFRKDFKFYKVREINDYHHAHDAYLNAVVGTALLKKYPKLAPEFVYGEYKKYDIRKFITSSGDKATAKYFFYSNLMNFFKRVIRYSNGKVVVRPVIECSKDTGEIAWNKQTDFEKVRRVLSYPQVNIVKKVETQTGGFSKESILPKGNSDKLIPRKTKKFRWDTPKYGGFDSPNIAYSVFVIADVEKGKAKKLKTVKELVGISIMERSSFEENPVVFLEKKGYQNVQEDNLIKLPKYSLFEFEGGRRRLLASASELQKGNEVVLSRHLVELLYHAHRVNSFNNSEHLKYVSEHKKEFGEVLSCVENFAKSYVDVEKNLGKIRAVADKIDTFSIEDISISFVNLLTLTALGAPADFNFLGEKIPRKRYTSTKECLNATLIHQSITGLYETRIDLSKLGEE

SEQ ID NO: 142 - protein, 1168 aa, Azospirillum sp.
MARPAFRAPRREHVNGWTPDPHRISKPFFILVSWHLLSRVVIDSSSGCFPGTSRDHTDKFAEWECAVQPYRLSFDLGTNSIGWGLLNLDRQGKPREIRALGSRIFSDGRDPQDKASLAVARRLARQMRRRRDRYLTRRTRLMGALVRFGLMPADPAARKRLEVAVDPYLARERATRERLEPFEIGRALFHLNQRRGYKPVRTATKPDEEAGKVKEAVERLEAAIAAAGAPTLGAWFAWRKTRGETLRARLAGKGKEAAYPFYPARRMLEAEFDTLWAEQARHHPDLLTAEAREILRHRIFHQRPLKPPPVGRCTLYPDDGRAPRALPSAQRLRLFQELASLRVIHLDLSERPLTPAERDRIVAFVQGRPPKAGRKPGKVQKSVPFEKLRGLLELPPGTGFSLESDKRPELLGDETGARIAPAFGPGWTALPLEEQDALVELLLTEAEPERAIAALTARWALDEATAAKLAGATLPDFHGRYGRRAVAELLPVLERETRGDPDGRVRPIRLDEAVKLLRGGKDHSDFSREGALLDALPYYGAVLERHVAFGTGNPADPEEKRVGRVANPTVHIALNQLRHLVNAILARHGRPEEIVIELARDLKRSAEDRRREDKRQADNQKRNEERKRLILSLGERPTPRNLLKLRLWEEQGPVENRRCPYSGETISMRMLLSEQVDIDHILPFSVSLDDSAANKVVCLREANRIKRNRSPWEAFGHDSERWAGILARAEALPKNKRWRFAPDALEKLEGEGGLRARHLNDTRHLSRLAVEYLRCVCPKVRVSPGRLTALLRRRWGIDAILAEADGPPPEVPAETLDPSPAEKNRADHRHHALDAVVIGCIDRSMVQRVQLAAASAEREAAAREDNIRRVLEGFKEEPWDGFRAELERRARTIVVSHRPEHGIGGALHKETAYGPVDPPEEGFNLVVRKPIDGLSKDEINSVRDPRLRRALIDRLAIRRRDANDPATALAKAAEDLAAQPASRGIRRVRVLKKESNPIRVEHGGNPSGPRSGGPFHKLLLAGEVHHVDVALRADGRRWVGHWVTLFEAHGGRGADGAAAPPRLGDGERFLMRLHKGDCLKLEHKGRVRVMQVVKLEPSSNSVVVVEPHQVKTDRSKHVKISCDQLRARGARRVTVDPLGRVRVHAPGARVGIGGDAGRTAMEPAEDIS

SEQ ID NO: 143 - protein, 1345 aa, Streptococcus mutans
MKKPYSIGLDIGTNSVGWAVVTDDYKVPAKKMKVLGNTDKSHIKKNLLGALLFDSGNTAADRRLKRTARRRYTRRRNRILYLQEIFAEEMSKVDDSFFHRLEDSFLVTEDKRGERHPIFGNLEEEVKYHENFPTIYHLRQYLADNPEKVDLRLVYLALAHIIKFRGHFLIEGKFDTRNNDVQRLFQEFLAVYDNTFENSSLQEQNVQVEEILTDKISKSAKKDRVLKLFPNEKSNGRFAEFLKLIVGNQADFKKHFELEEKAPLQFSKDTYEEELEVLLAQIGDNYAELFLSAKKLYDSILLSGILTVTDVSTKAPLSASMIQRYNEHQMDLAQLKQFIRQKLSDKYNEVFSDVSKDGYAGYIDGKTNQEAFYKYLKGLLNKIEGSGYFLDKIEREDFLRKQRTFDNGSIPHQIHLQEMRAIIRRQAEFYPFLADNQDRIEKILTFRIPYYVGPLARGKSDFAWLSRKSADKITPWNFDEIVDKESSAEAFINRMTNYDLYLPNQKVLPKHSLLYEKFTVYNELTKVKYKTEQGKTAFFDANMKQEIFDGVFKVYRKVTKDKLMDFLEKEFDEFRIVDLTGLDKENKAFNASYGTYHDLRKILDKDFLDNSKNEKILEDIVLTLTLFEDREMIRKRLENYSDLLTKEQVKKLERRHYTGWGRLSAELIHGIRNKESRKTILDYLIDDGNSNRNFMQLINDDALSFKEEIAKAQVIGETDNLNQVVSDIAGSPAIKKGILQSLKIVDELVKIMGHQPENIVVEMARENQFTNQGRRNSQQRLKGLTDSIKEFGSQILKEHPVKHSQLQNDRLFLYYLQNGRDMYTGEELDIDYLSQYDIDHIIPQAFIKDNSIDNRVLTSSKENRGKSDDVPSKNVVRKMKSYWSKLLSAKLITQRKFDNLTKAERGGLTDDDKAGFIKRQLVETRQITKHVARILDERFHTETDENNKKIRQVKIVTLKSNLVSNFRKEFELYKVREINDYHHAHDAYLNAVIGKALLGVYPQLEPEFVYGDYPHFHGHKENKATAKKFFYSNIMNFFKKDDVRTDKNGEIIWKKDEHISNIKKVLSYPQVNIVKKVEEQTGGFSKESILPKGNSDKLIPRKTKKFYWDTKKYGGFDSPIVAYSILVIADIEKGKSKKLKTVKALVGVTIMEKMTFERDPVAFLERKGYRNVQEENIIKLPKYSLFKLENGRKRLLASARELQKGNEIVLPNHLGTLLYHAKNIHKVDEPKHLDYVDKHKDEFKELLDVVSNFSKKYTLAEGNLEKIKELYAQNNGEDLKELASSFINLLTFTAIGAPATFKFFDKNIDRKRYTSTTEILNATLIHQSITGLYETRIDLSKLGGD

SEQ ID NO: 144 - protein, 1024 aa, Helicobacter mustelae
MIRTLGIDIGIASIGWAVIEGEYTDKGLENKEIVASGVRVFTKAENPKNKESLALPRTLARSARRRNARKKGRIQQVKHYLSKALGLDLECFVQGEKLATLFQTSKDFLSPWELRERALYRVLDKEELARVILHIAKRRGYDDITYGVEDNDSGKIKKAIAENSKRIKEEQCKTIGEMMYKLYFQKSLNVRNKKESYNRCVGRSELREELKTIFQIQQELKSPWVNEELIYKLLGNPDAQSKQEREGLIFYQRPLKGFGDKIGKCSHIKKGENSPYRACKHAPSAEEFVALTKSINFLKNLTNRHGLCFSQEDMCVYLGKILQEAQKNEKGLTYSKLKLLLDLPSDFEFLGLDYSGKNPEKAVFLSLPSTFKLNKITQDRKTQDKIANILGANKDWEAILKELESLQLSKEQIQTIKDAKLNFSKHINLSLEALYHLLPLMREGKRYDEGVEILQERGIFSKPQPKNRQLLPPLSELAKEESYFDIPNPVLRRALSEFRKVVNALLEKYGGFHYFHIELTRDVCKAKSARMQLEKINKKNKSENDAASQLLEVLGLPNTYNNRLKCKLWKQQEEYCLYSGEKITIDHLKDQRALQIDHAFPLSRSLDDSQSNKVLCLTSSNQEKSNKTPYEWLGSDEKKWDMYVGRVYSSNFSPSKKRKLTQKNFKERNEEDFLARNLVDTGYIGRVTKEYIKHSLSFLPLPDGKKEHIRIISGSMTSTMRSFWGVQEKNRDHHLHHAQDAIIIACIEPSMIQKYTTYLKDKETHRLKSHQKAQILREGDHKLSLRWPMSNFKDKIQESIQNIIPSHHVSHKVTGELHQETVRTKEFYYQAFGGEEGVKKALKFGKIREINQGIVDNGAMVRVDIFKSKDKGKFYAVPIYTYDFAIGKLPNKAIVQGKKNGIIKDWLEMDENYEFCFSLFKNDCIKIQTKEMQEAVLAIYKSTNSAKATIELEHLSKYALKNEDEEKMFTDTDKEKNKTMTRESCGIQGLKVFQKVKLSVLGEVLEHKPRNRQNIALKTTPKHV

SEQ ID NO: 145 - protein, 765 aa, Butyrivibrio fibrisolvens
MGITIGLDLGVASVGWAVVNDDYEILESCSNIFPSADASKNSERRGFRQGRRLTRRRKNRIHDFQKLWEDKGFVIPSQGTEDVLAIKIKGLSEKLSVDEVYWVLLNSLKHRGISYLDDADSGDNSSDYAKSISRNEEELKEKLPCEIQWERLQKYGAYRGNISIVEDGEPITLRNVFTTSAYKKEVEQFIDTQAKYNAQYSGDFKADYLEIFNRKREYYEGPGNELSRTDYGKYTTEINADGEYITVDNIFDKLVGKCSVNPDERRAAGASYTAQEFNVLNDLNNLTISSESSFIEDGKLTEDAKRKIIETIKNAKTVNVKKIICDVIGDKKCQISGARIDKNEKEIFHSFEAYNKMRRALEEIGFDISSLSRENLDLIGDILTLNTDRESILNAFNRKGIELADEAKDILVKVRKTNGSLFNKWQSFGLSIMNELIPELYAQPKNQMELLTAMGVFKSRGDRFLECKEIPGDLIVDDIYNPVVSKTVRITVRILNALIKKYGYPDRVVIEMPRDKNSDEEQQRLKKEQRDNENEIKDIKARVKTEYGREITEEDFRQHSKLSLKLKLWNEQQGICPYSGKSIKIDDLLDNPNLFEVDHIIPLSISFDDSRNNKVLVYSSENQDKGNRTPLAYLASVNRQWDIHSFMDYVLKTYAGAQKRKKRDNLLNEQDITKVEVLQGFVNRNINDTRYASKVVLNSLQEYFSSKECSTKVKVIRGSFTHQMRVNLKLKKTVMNHMFIMQLMQCLLLFHRWDMTLIMNLQISI

SEQ ID NO: 146 - protein, 1338 aa, Coprococcus catus
MKQEYFLGLDMGTGSLGWAVTDSTYQVMRKHGKALWGTRLFESASTAEERRMFRTARRRLDRRNWRIQVLQEIFSEEISKVDPGFFLRMKESKYYPEDKRDAEGNCPELPYALFVDDNYTDKNYHKDYPTIYHLRKMLMETTEIPDIRLVYLVLHHMMKHRGHFLLSGDISQIKEFKSTFEQLIQNIQDEELEWHISLDDAAIQFVEHVLKDRNLTRSTKKSRLIKQLNAKSACEKAILNLLSGGTVKLSDIFNNKELDESERPKVSFADSGYDDYIGIVEAELAEQYYIIASAKAVYDWSVLVEILGNSVSISEAKIKVYQKHQADLKTLKKIVRQYMTKEDYKRVFVDTEEKLNNYSAYIGMTKKNGKKVDLKSKQCTQADFYDFLKKNVIKVIDHKEITQEIESEIEKENFLPKQVTKDNGVIPYQVHDYELKKILDNLGTRMPFIKENAEKIQQLFEFRIPYYVGPLNRVDDGKDGKFTWSVRKSDARIYPWNFTEVIDVEASAEKFIRRMTNKCTYLVGEDVLPKDSLVYSKFMVLNELNNLRLNGEKISVELKQRIYEELFCKYRKVTRKKLERYLVIEGIAKKGVEITGIDGDFKASLTAYHDFKERLTDVQLSQRAKEAIVLNVVLFGDDKKLLKQRLSKMYPNLTTGQLKGICSLSYQGWGRLSKTFLEEITVPAPGTGEVWNIMTALWQTNDNLMQLLSRNYGFTNEVEEFNTLKKETDLSYKTVDELYVSPAVKRQIWQTLKVVKEIQKVMGNAPKRVFVEMAREKQEGKRSDSRKKQLVELYRACKNEERDWITELNAQSDQQLRSDKLFLYYIQKGRCMYSGETIQLDELWDNTKYDIDHIYPQSKTMDDSLNNRVLVKKNYNAIKSDTYPLSLDIQKKMMSFWKMLQQQGFITKEKYVRLVRSDELSADELAGFIERQIVETRQSTKAVATILKEALPDTEIVYVKAGNVSNFRQTYELLKVREMNDLHHAKDAYLNIVVGNAYFVKFTKNAAWFIRNNPGRSYNLKRMFEFDIERSGEIAWKAGNKGSIVTVKKVMQKNNILVTRKAYEVKGGLFDQQIMKKGKGQVPIKGNDERLADIEKYGGYNKAAGTYFMLVKSLDKKGKEIRTIEFVPLYLKNQIEINHESAIQYLAQERGLNSPEILLSKIKIDTLFKVDGFKMWLSGRTGNQLIFKGANQLILSHQEAAILKGVVKYVNRKNENKDAKLSERDGMTEEKLLQLYDTFLDKLSNTVYSIRLSAQIKTLTEKRAKFIGLSNEDQCIVLNEILHMFQCQSGSANLKLIGGPGSAGILVMNNNITACKQISVINQSPTGIYEKEIDLIKL

SEQ ID NO: 147 - protein, 1035 aa, Candidatus Puniceispirillum
MRRLGLDLGTNSIGWCLLDLGDDGEPVSIFRTGARIFSDGRDPKSLGSLKATRREARLTRRRRDRFIQRQKNLINALVKYGLMPADEIQRQALAYKDPYPIRKKALDEAIDPYEMGRAIFHINQRRGFKSNRKSADNEAGVVKQSIADLEMKLGEAGARTIGEFLADRQATNDTVRARRLSGTNALYEFYPDRYMLEQEFDTLWAKQAAFNPSLYIEAARERLKEIVFFQRKLKPQEVGRCIFLSDEDRISKALPSFQRFRIYQELSNLAWIDHDGVAHRITASLALRDHLFDELEHKKKLTFKAMRAILRKQGVVDYPVGFNLESDNRDHLIGNLTSCIMRDAKKMIGSAWDRLDEEEQDSFILMLQDDQKGDDEVRSILTQQYGLSDDVAEDCLDVRLPDGHGSLSKKAIDRILPVLRDQGLIYYDAVKEAGLGEANLYDPYAALSDKLDYYGKALAGHVMGASGKFEDSDEKRYGTISNPTVHIALNQVRAVVNELIRLHGKPDEVVIEIGRDLPMGADGKRELERFQKEGRAKNERARDELKKLGHIDSRESRQKFQLWEQLAKEPVDRCCPFTGKMMSISDLFSDKVEIEHLLPFSLTLDDSMANKTVCFRQANRDKGNRAPFDAFGNSPAGYDWQEILGRSQNLPYAKRWRFLPDAMKRFEADGGFLERQLNDTRYISRYTTEYISTIIPKNKIWVVTGRLTSLLRGFWGLNSILRGHNTDDGTPAKKSRDDHRHHAIDAIVVGMTSRGLLQKVSKAARRSEDLDLTRLFEGRIDPWDGFRDEVKKHIDAIIVSHRPRKKSQGALHNDTAYGIVEHAENGASTVVHRVPITSLGKQSDIEKVRDPLIKSALLNETAGLSGKSFENAVQKWCADNSIKSLRIVETVSIIPITDKEGVAYKGYKGDGNAYMDIYQDPTSSKWKGEIVSRFDANQKGFIPSWQSQFPTARLIMRLRINDLLKLQDGEIEEIYRVQRLSGSKILMAPHTEANVDARDRDKNDTFKLTSKSPGKLQSASARKVHISPTGLIREG

SEQ ID NO: 148 - protein, 1270 aa, Mycoplasma gallisepticum
MNNSIKSKPEVTIGLDLGVGSVGWAIVDNETNIIHHLGSRLFSQAKTAEDRRSFRGVRRLIRRRKYKLKRFVNLIWKYNSYFGFKNKEDILNNYQEQQKLHNTVLNLKLEALNAKIDPKALSWILHDYLKNRGHFYEDNRDFNVYPTEELANYFDEFGYYKGIIDSKNDDDDKLEEGLTKYKFSNQHWLEEVKKVLSNQTGLPEKFKEEYESLFSYVRNYSEGPGSINSVSPYGIYHLDEKEGKVVQKYNNIWDKTIGKCSIFPDEYRAPKNSPIAMIFNEINELSTIRSYSIYLTGWFINQEFKKAYLNKLLDLLIKTNSEKPIDARQFKKLREETIAESIGKETLKDVESEEKLEKDDHKWKLKGLKLNTNGKIQYNDLSSLAKFVHKLKQHLKLDFLLEDQYTPLDKINFLQSLYVYLGKHLRYSNRVDSANLKEFSDSSRLFERVLQEQKDGLFKLFEQTDKDDEKILTQTHSLSTKAMLLAITRMTNLDNDEDNQKNNDKGWNFEAIKNFDQKFIDITKTNNNLSLKQDKRYLDDQFINDAILSPGVKRILREATKVFNAILKQFSEEYDVTKVVIELARELSEEKELENTKNYKKLIKKNGDKISEGLKALGIAEDKIEEILKSPTKSYKVLLWLQQDHIDPYSQKEIAFDDILTKTEKTEIDHIIPYSISFDDSSSNKLLVLAESNQAKSNQTPYEFINSGKAEITWEVYEAYCHKFKNGDSSLLDSTQRSKKFAKMMKTDTSSKYDIGFLARNLNDTRYATIVFRDALKDYANNHLVEDKPMFKVVCINGGVTSFLRKNFDPKSWYAKKDRDKNIHHAVDASIISIFSNETKTLFNQLTKFADYKLFKNTDGSWKKIDPKTGVVSEVTDENWKQIRVRNQVSEIAKVIDKYIQDSNIERKARYSRKIENKTNISLFNDTVYSAKKVGYEDQIKRKNLKTLDIHESAEENKNSKVKKQFVYRKLVNVSLLNNDKLADLFAEKEDILMYRANPWVINLAEQIFNEYTENKKIKSQNVFEKYMLDLTKEFPEKFSEAFVKSMIRNKTAIIYNVEKDVVHRIKRLKILSSELKENKWSNVIIRSKNESGTKLSYQDTINSIALMIMRSIDPTAKKQYIRVPLNTLNLHLGDQDFDLHNIDAYLKKPKFVKYLKANEIGDEYKPWRVLTSGTLLIHKKDKKLMYISSFQNLNDLIEIKNLIETEYKENVDSDPKKKKKASQILRSLSVILNDYILLDAKYNFDILGLSKNKIDEILNSKLDLDKIAK

SEQ ID NO: 149 - protein, 1204 aa, Prevotella ruminicola
MERILGIDTGTNSLGWAIVDKDENQYHLVAKGTNIFSEGVKIEKGIESSKAAERTEHRSVRKHYWRRKIRKIRLLTILSDNDLCPRLKHEQLRQWRLKKVYPTDDTFMEWQRTEDKAQVNPYKFRYICLTQKLDLSDITQRFILGRALYHLNQRRGFLSNRKEATKESEGTVKEGISSLSKDMKDSGCEYLGEYFYQLYQQGKKIRNHYTARKEHYLKEFKAICSKQELDDALIEKLEKAIFDQRPLKSQKGQVGTCTFEKGKSRCPSSHPLYEDFRMYSFINNIKVQVDTLYDKGERSLTDEEKQLIIPLFKRKSKRTFPFEDIAKKIAGKNNYCYIKSNEEKAYKFNYQMDTQVSGSPVNAQLEEIFGEDWLSSVCEVYTLANNKSRFQIMNDVWHVLFFYDDEDKLKEFAKDRLQLDDELAEKFSKISIPNDYAALSLKAIRKIMPYLRDYGLIYSEAVFLANLVDVLPQHVWGIKEMREAAIENVIDVMHSYDKNNIDGITLEGCVKTFLKERYQVSDDNLKKLYHPSMLDPYPRQRPNDEGVFQLGSPRISSVKNPMAMHSLFRLRKVVNLMLKKGYITPDTKVHIEFSRDLNDANKRWAIQTWQRENEKERERCRKEIEKYIASPSDTDILKYQLWEEQNHKCLYTGDEIRITDFLGDNPKYDIEHTIPRSAGGDSTKMNLTLCSSRFNRDEKKTKLPAELVNHDEILERISNWKEKYEDIDKQIRKISTKGATSKEDKDSKIRRRHYLILQRDYWRGKYQRFTMTEVPEGFSRRQGTDISVISRYARMYLKSVFKQVYIVKGIATSDFRKMWGIQDEYAKKERVNHVHHCIDAITIACIGKAEYDKLADYRHQYDDYLFQGKTKPTFDKPWPSFVIDIKHIQDELLIAHYAKDNLEKFTKKNLRGKDGRIIRDKFGNKLQMKGDTSRNSLHNDKFYGAINHEGEIKYVYRTNIEALDAKSIGNIVDPTVRSIIESAIAIHGSLKAAINKGIWMNEEKHIPIKKVRVFRNDVKKPIELKDQRDLSDKDYKQHYYVTNDGNYMMLIFSKLNNKGREIRQHVVINSLEATEVIKSHKRSQVGKVVWESYYSKEGFDLIYKLKSGTMILLYENNRDEVWDLDIRNLQKRLYIITKMKYDGRIYMMHHQEAREKKDLEEKSGSFKINEDYRPLIVNSYNQFNALVQDLDFEINDLGEIRRLI

SEQ ID NO: 150 - protein, 1178 aa, Scardovia inopinata
MGKRHNSNMAKKKISYRIGIDVGLNSTGLAAIEVDDDGAPIRILNTMSVIHDGGVDPDAAKVRGTRLAISGIARRTRRMRRRRAKRLDRLEQILEKYGYTDTEPVLEEPYGPWICRAELADGFINDDEQRRMMIGIAIRHIARHRGWRNPYQNVRALLNIDDSDLSEEYKNLKEKVQDQINDGKDLPNFTPSQLVRDYLDNFSGQPAARIRTGKAGPRGNRRDAVGILPQRMRQSDYAYELQRIFDMQKIGRDEAQELLMAVFEAKSPKGSAEKRIGKDPLTGKKRALKASLAFQKYRIVATITNLRIKTGTGSERMLSPTELNDIYTYLLRVQDDNHLPTWEDICEEVLHIGRYQLAGIGKTFEGGERISNMPPVIQTSLAIHGLSEGTLAEKLTKWWDKADDDSRESMIKLLSNTVDIDRVNEVDENFASALDFIDSLDDEELTKLDKIALPRGRAAYSEEALNKLTADMLNTGDDLFSARQRIYHVNNSWRPPQPPIGEPLGNPAVDRVLKITNRYLMNCLNRWGQPRRVTIEHTRSGFTSVKQATEHQKISDKRAEYRRDIVKQLEEAGVESVHEYDIRRWEAVQRQNGQCLYCGRDITFKTCEMDHIVPRKGPGSTNTRTNFAAVCPECNRMKSNIPFASWAETKEAKDRGVSLDKAIKQVRFFNFTKNEYSPQAQRNFKKSMIERLKQKTSDEPLDNRSIESVSWMADELYKRIDWYFNHEQYETSKKAINDDKDNLSGTQVVVYPGSITAEARNAAGLGGNIHFIGGRYKTRLDRRHHAVDACVIAMMEPGIARILTERNQLRQAQRLTARIEDDEVNWKDYPTENTAGYNKYQAWSDRMHALLEYMNNALDYDKIPVVRWERLQLGNRSAHEDTIHPLKKLPLSHEISAIDINHASTPALYEALVSLPDFSEQDGLPADPSRQINVNGERYSGDDLVSFFNSNAAQIAIQGGSAELGTAFHHARIYRCWTVGKNGKKKIFFGMIRVYQHDLLHAKNEDLFTYPLKRSSVSMRYAKKEVVHAILSGNAEYVGYLCVGDELVLDLKGDKSNDEGGSRLSGQVGEFVQKFEEDSKVNSQIVNRWTVDGFPDEAKLRLRPSMFAGEGLKNMKSELVENAAIKNILSKTGWRVSVDVISKKSPVVLRRNAFGEPRWKTNAGLPVSYRWQDTETKE

SEQ ID NO: 151 - protein, 1371 aa, Gordonibacter pamelaeae
MNLRNVESYQVGLDIGTGSVGWAVLDDNGDLCRFKGKPTWGSRVFPTAETAAEARVHRGQRRRYDRRRQRIDLLQRFFADEVAKVDPEFFIRLNQARLHPENRDPAHADYRWPLFNGSNFTEKDYYRQFPTIYHLRAHLLKSDEPADIRLVYLALHNIVKHRGNFLHQDNPSLSARNANVGDAVEALCLALDEWCGAHDVECACDEAALAEALGDASLRPGEKRERAEAALGVEKAHKKLAKAVSSAVVGYAAEFGHVFFAESEGSKFALSNDEKVEAYVCPDEGRDLFDAMRAVHSSYVLMGILSEAQGELLSVCKVGEYERYKRDLETLKSLVRAYGPERYDEFFCGPFYEGTRDYDPGKAQGYTKYNLGASKLSHEDFLKEVQKLLKDIGAQADERYADIERAIEAGAFLRRLKTSDNGTIPYQLHLEEMDAIIERQAAFYPFLAQEKDKLKSLVSFRIPYYVGPLTQKNAARDGKGEARFAWSSRKPGMEDARVYPWNWEDVIDKDQSAEDFIRRMTGTCTYLKGEPVLARCSLDYELFCVLNELAGARWTQDGDKSYRFDAADRLGIVEDLFKKRKRVTYEAAEKWLARTHGPESGKSAGGAYHVSGGQGEDAFESQLSSHYDFCKILGVDELSDADEAMAEDIILWNTVFEDRSILKRKIKLAYGDRLGDAQVRKLCQKRYTGWGRLSGELLRGLRSATDNGPKTIMDILLEGDPNHARRMGAAMNLMEILHDDLLEFQAKIDEHNRERALAVGGMSVDEVTGSPALRRGINQALRVVDEIAGIAGKPPAHIYVEVTRDEGARNKGRRTTSRYRALEAALSSIKAQCADVYAELKERDPRALDDERLTLYFMQCGKCMYSGDALDINKLQTYQVDHILPQSYVKDDSFENKVLVRPDTNQRKGDTLLLDERLIARMRGFWRTLRDAELIGEKKFNNLTRTSVSDEQMKKFVSRQLVETGQMVKQVQQLLQARYPESEVQPVKAGVSHQLRVGCALAKSREINDFHHAHDAYLACQVGRFVQYRHSAVYSEPVKMAAVVKQFIKKQAEDYRRTRELPGSDGFIVSSFMTPGFDVKTGEVFRDAWDAGAEIDRIRRCFDYKDCFISRMPEETHGAFWDATIYSPRAAGKTLSLPLKRGLDPRKYGSYSREQFAYFFVYEAVKPKKKQRVLEFAPVPVRVASALANDPDALEDYARELAEAEGLVFERIRRRKVYKYQQIIVGDSRLYVTGREEVRNARQLAFSQDETKLICRIEQGEECEEGELLDLFRSMQRKYLACAPRLARLMKVAEMEEGFIAATASGKREVLLSLTSIAAAHRNSIDLKPIGRKGSSGQMKITFSKELSTNGILFVDSSVTGMFERRCRLGL

SEQ ID NO: 152 - protein, 1388 aa, Zunongwangia profunda
MKRILGLDLGTNSIGWALVNEAENEKEISKIIKLGVRVNPLTIDEKTNFEKGRPLSTNADRTLKRGARRNLQRYKLRRENLIEILIDNHIITKETPLTEIGKGTTYQTLSLRAKAVRERIDLEDFAKVLLAINKKRGYKSSRKASNDEEGQAIDGMAIAKELYERGITPGQYVLELLENDRKYIPDFYRSDLKQEFNKIWNNQKTFYPEILTDELFKELDGKNKSQTWAICQKPFNIKGIKRITKGREKTIENYHWRVKGLSGKLNLEKLAIILQEINNDINQSSGYLGGISDKSKKLYLNKETVGEFLYKQIAKNPHTSLKNQVFYRHDYLDEFEQIWKTQSNFNANLTDELKQEIRDVIIFYQRKIKSQKSLISFCQFESWEQEYFDKETGKTKTRTVGRRVIPKSSPLFQEFKIWQNLNHLVFTNSETDEKIEIKEVEQEIRKELFEELNLRGDLNPNDLLKILRSQFKIGKLSNWKCNFEKIEGNRTNAALFNIYQKISDFEGYGIDWNKSNAKKIRKELKATFPEIGIDASILEFDAYKKQLTNQSSYELWHLLYSAEEDFKISEQDKLIYGNSSVSLKKKLHLKFGFNPEYAKMLANLSLMSDYGNLSAKAIKKILPYLEDGHLYSEACRLAGYNHSKSLTAEELEKFEPKAKLDLLKKNSLRNPVVEKILNQMVNVVNQVIDTYGKPDGVRIELARELKKSAKERAEMTKGIADGTRRNEEIKKIITQKFGIPNPTKSDLVRYRLWQELESRGYKDIFTDKYISPDKIFSSEIDIEHIIPKALLFDDSFSNKTLSFRNVNLKKANRTALDFITQDYQSNVEAYKERVETWNKDNHISKGKRNKLLMSLKDIPDGFIERDLRNSQYIARKAKRMLYEVFPNEVLATSGSITDKLRSDWDLINVMKELNLPKYKALGLTEYEERLDKGTEELFKHEVIKDWTKRNDHRHHAMDALAVAFTTHNHIQYINNLNARKDITQDNHPIIKNIENLITEVNSKGKRVFKAPMSSFRESAKEQIEAILVSFKNKNKVVTKNINQTKKEGGFNYQNAKTPRGQLHKETIYGKSKQPLEKPVKINNRFCKKQVGLIINFKEQEAVLHHLKKYDNNEKIAFSNKTLKSDPIQVNGSPLREVKIFEEIFTIRKDINPDNFKTQKHLDKIIDKGIKEVMKKRLEEYNGDFKTAFSDLDKNPIWLNQSKGITIKRATISGVTNAEPLHQAKDHLGNIILDDNGKEIPIDYVSTGNNHHVAIYQDESGNLQEEVVSFYEAVIRKNQDQPIIKKRHPKGWKFLFTMKQNEMFVFSSENFNPSEIDLLDEKNAAIISPNLFRVQKIATKNYMFRHHLETEVTNNLDFTYRHFQATEWLRNLCKVRIDHIGRIVQIGEY

SEQ ID NO: 153 - protein, 1082 aa, Methylosinus trichosporium
MRVLGLDAGIASLGWALIEIEESNRGELSQGTIIGAGTWMFDAPEEKTQAGAKLKSEQRRTFRGQRRVVRRRRQRMNEVRRILHSHGLLPSSDRDALKQPGLDPWRIRAEALDRLLGPVELAVALGHIARHRGFKSNSKGAKTNDPADDTSKMKRAVNETREKLARFGSAAKMLVEDESFVLRQTPTKNGASEIVRRFRNREGDYSRSLLRDDLAAEMRALFTAQARFQSAIATADLQTAFTKAAFFQRPLQDSEKLVGPCPFEVDEKRAPKRGYSFELFRFLSRLNHVTLRDGKQERTLTRDELALAAADFGAAAKVSFTALRKKLKLPETTVFVGVKADEESKLDVVARSGKAAEGTARLRSVIVDALGELAWGALLCSPEKLDKIAEVISFRSDIGRISEGLAQAGCNAPLVDALTAAASDGRFDPFTGAGHISSKAARNILSGLRQGMTYDKACCAADYDHTASRERGAFDVGGHGREALKRILQEERISRELVGSPTARKALIESIKQVKAIVERYGVPDRIHVELARDVGKSIEEREEITRGIEKRNRQKDKLRGLFEKEVGRPPQDGARGKEELLRFELWSEQMGRCLYTDDYISPSQLVATDDAVQVDHILPWSRFADDSYANKTLCMAKANQDKKGRTPYEWFKAEKTDTEWDAFIVRVEALADMKGFKKRNYKLRNAEEAAAKFRNRNLNDTRWACRLLAEALKQLYPKGEKDKDGKERRRVFSRPGALTDRLRRAWGLQWMKKSTKGDRIPDDRHHALDAIVIAATTESLLQRATREVQEIEDKGLHYDLVKNVTPPWPGFREQAVEAVEKVFVARAERRRARGKAHDATIRHIAVREGEQRVYERRKVAELKLADLDRVKDAERNARLIEKLRNWIEAGSPKDDPPLSPKGDPIFKVRLVTKSKVNIALDTGNPKRPGTVDRGEMARVDVFRKASKKGKYEYYLVPIYPHDIATMKTPPIRAVQAYKPEDEWPEMDSSYEFCWSLVPMTYLQVISSKGEIFEGYYRGMNRSVGAIQLSAHSNSSDVVQGIGARTLTEFKKFNVDRFGRKHEVERELRTWRGETWRGKAYI

SEQ ID NO: 154 - protein, 1186 aa, Gardnerella vaginalis
MEGNISYAIGIDVGLNSVGLAAIRLDNNGEPIRILKAMSVIHDAGIDPNGAKESDTRKAISGVARRVRRLYRQRRRRLQKLDFLLHSLGFPVVENKDLDFSDSFTPWIFRAKLADEYIADEKQRKQMLSVAIRHIARHRGWRNPYQSIKSMTQETEYSEFYNELLKNIEKFAPGVSCEGSTPAQLVRDYLLSQQGKASRRLRITTDDRRKNHPNSLDPVLPRKLMQSDNMLEILNIFNVQHIDNKYVREQIINAVFYAKSPRGSAENRVGKDAITGKGKRALKASLAFQKYRIISTISNLRIRENSKERCLTIEEKQSVYKLLTTSTDEYSKEKSAEAPLYTWIDVADCLGIERYKLRGVGSQIEDGESVGNRPPMLNSELAILYANAKSLKQSLITWWLAANRTQEDKEAFIEILSNTVDIEAIHDNPEYQDKYGSVIAFIDSMDETEIAALENISLPNGRAAYSLETLDKLNKQMLETDDDLFEARKKLFNLPNNWRPSEAPIAEPTGNPSVDRVLKIVHRFLISAKNRWGNPERINIEHVRSGFQSKKMANSYKKLLDKRTEGKENLKAMMRNSLHLGTSDSISDADIRRYEAVQRQNGQCLYCGSEITYHTCELDHIVPRKGPGSTNTRENLVATCSSCNAQKCNTPFATWCEESTYCKNHDISVDSAINRVRAFIFPPNSYDKRGASQFKKEVIARLKQKVGDEAFDNRSIESVAWMANELHRRIDWYYNSQNYQTNNGISDITNKAQTNVGVYAGSLTAIARRMSGIDGKLEFFDGRRKTRFDRRHHAVDASVIAMMTPGIAQILAIKCNLRETQLLQGNKVVPGGIDWKEYPTANDQGYQQYANWSVRMNALLELLNEEMRADRIAVVNSIRLRYSNSSVHKDDVHALLKLHVGDEIDSETIRRASTPALYCALTRNPDYDVNNGLPENTDRTILLHDKKLNADDSITFFKSKAAQLFVREGSVEIGNSIHHLRIYEYFEKLKSGKVKKSYGMIRVFQDDLHRYIHEDLFSCDLPEQSISMRYADTKVAHAVQTGNANYLGYLVPGDEIIVDFSHVKLSGYIGEFVEFLNKIGANCAAYKHWVVAGTDDKTTLILKPSMISSEGIDKLYSNCERNNFDYASYEKSIDKILVDKGWRVSVNVLDQYKAATIRRNALGEPRWASRSHLPISWSWDTGENRE

SEQ ID NO: 155 - protein, 1434 aa, Bacteroidetes oral
MKNILGLDLGTNSIGWAYVKQAQNDSEKSEIAELGVRVNPLTVDEKTNFEKGKPISTNADRTLKRGARRNLQRYKLRRQELIELLKDYQVISDKTILAEDGKETTFETLRLRVKSAKEQVSLEELARILLMINKKRGYKSSRKAKNEDEGQLIDGMEIARRLYDENLTTGQLSLQLLKEGKKSLPDYYRSDLQHELDKVWNFQKQFHPDILTDEFYTSIQGKGQKATRESFSSKYGIDTAENKGSREEKKLQAYQWRADATHKELTKEELAFVITEINNNINNSSGYLGAISDRSKELIFANETVGEYLWKQIQNDPHTSLKNQVFYRQDYFDEFERIWETQSGFYPQILTESLKNELRDILIFYQRKLKSQKALVSICEFESKEIPLKDKQGNPISKNGIPVTKLVGPKVAPKSSPLFQEFKIWQNLNNVLVRPKGSRKRKVTTNQQSTLLEGQEPVFELNLEQKELLFEELNLKGNLKTDYCLELIGYSAKEWEMNYPTLEGNKTNKALYEAYLKIIDSEGYDAKKLLKVKTDKDDINLDDIKVSASEIKTMISDIFNELGINTKILDFDAELERKQFEAQASYRLWHLLYSYEGDDSKSGNELLYRLLEDKFGFKREHSKTLANVSLLSDYGNLSTKAIRTIYPYIKENKFSTACELAGYRHSKLSISKEENENRTLKDTLDVLKKNSLRQPVVEKILNQMINLINELIEKHSEKDEKGNIVKYFKFDEIHIELARELKKNAEERRELDSKVREGKDRNEKIITILKSEFGLPYPTKNDITRYRLYEELKDNGYKDLYTNTYIPREKLFSKEIDIEHIIPKSRLFNDSFSNKTICYRQDNLNKGERTAYDYIEGLGKTQLDEYLNRVENLYTNKFITKAKYRNLLKKESEIGDGFIERDLRETQYIAKKAKEMLLQITRHVVSTTGSITDRLRDDWELVNVMRELNLPKYKVLGLTEIQERKNGQTVEVITDWTKRNDHRHHAMDALTVAFTKHSHIQYLNFLNARKDEKHKEYSNIMGIQQLETEKTTDKDGKDRRVFKTPIPNFRQVAKEHLESILISHKTKNKVVTRATNKIAGSKKQQETLSPRGQLHKETVYGKYRRYVQKEEKIGSKFDLQTIERVANPLYKRLLTKRLEENGGDPKKAFTGKNALAKSPIYLDETQTQQLPEKVKLVWLETDFSIRKDITPDNFKDEKSIDKVLDEGIKRILKDRLKSFDGDAKRAFTDLEQNPIWLNKEKGIAIKRVTISGVSNAEPLHTKKDHLGNEIFDDTGKPIPVDYVSTGNNHHIAIYRDENGNLQEKAVSFFEAVTRANQGLPTVDKTYNQHLGWQFLFTMKQNEMFVFPNKETGFDPQEIDLLDPKNKKLISPNLFRVQKISTKNYFFRHHLETSVETHNALNGVTYKSQLGLNGITDIIKVRINHLGDIVHIGEY

SEQ ID NO: 156 - protein, 1341 aa, Peptoniphilus sp.
MWGSRLFEEASTAQDRREHRSNRRRLERRKYRLDLLEELFVEEINKIDPEFFIRLRESKFHFEDRSLKNTFILFNDKMEGGYNDKVFFSKYPTIYHLRSALINGNKEDVRAVFLAIHNILKNRGHFLLAGNDINISLSLNDTLTDLFEYLKIHLGIEVEFENKLKDIEKIALDKNLSKSDKQKKIVQLLETDYKKQLADVFKLSLGLTANMENIFGKENEQGLEFINAENKIKKIQFDSSYEENIAEFDQFYGEYFEIIDICKKIYDAISLSQILVDGKGLSESKVLSYEKHKEDLKLLKKVLKNIDKAYDNKGEDRLVYKVLKEDKDKGTNYVNYSKLSNNGTATTKEEFYKFLSKNLDLKKFGKLNKEDIETLDYINSEILLGRFLPLQKEKINGVIPYQLQMKELTQILNNASKYLPFLNKIEDGMTVKDKIISLIKFRIPYYVGPLNEYNRIENGNGFAWIEKKKNEKIFPWNFNDVVDIEKSAEKFINNLTNKCTYIKEETVLPKNSIIYSKFMVLNELNNLQYGNKKLDIELKMKMYTDLFLEKKDNRKVTEKRILEYFRINGINDGKEKLTGLNNEIHADMKSYRDMCEIMGENFNINVAENIINWITVFHGEKKILINKIKNVYGKMFNDEQISKLSKLNYSDWGRLSKKLLTDIKCYIDADGINFPVSILEAMEVSNKNLMELLSNKYEFISCIDDINNKYFGDRDISASELIDELYVSPAVKRGIWQSVRILEEIVSIIGHNPKKIFIEMTRHNEEKVQKSSRRHNLEELYKAIRKDPEYVELIKEFDSTTDTDSFKIKKLYLYFMQLGKCAYSKEKIDFDKLFTDSYDIDHIYPRSKTKDDSIHNNLVLVKAKYNREKTDVYPIDINIQKNMNSFWNFLYTKKFITEEKYKRLIRTSDLTDEELAKFISRQLVETSQSTKATAEVLKQIYGDSDICYVKAENVSDFRYGSSRQKDKNDIQKLFVKCREVNHFHHAKDAYLNIVVGNVYDVKFTKNPVNFIKKNKMGNKSNYSLNHMFCFDVERNGYKAWDSSETIKTVGRMMKSNDVRITKHVHPTRGELYDATIYKAKIAKTGSYMPLKSSKNTPLSDVTKYGGYTKIKIAYYSVYKYKFSDKNLIKTEIRLIPIPIYLSKNDDDIKEYVKNYLNDRVNSKLIDFTKIYDKLYVNSLIKINGYLYYLGGKTNDRVWIDNAVSIVLDDKIEYLIKRISNDIKYGYEINVSDDELMDIYESLAEKANKKIFYNRLSDFEKIFSNMDVKKKFVKLEKNDKCRVLLQLLNVLTDSQTTYKLEMVGLKHSRSNIGMKISNLEEFKVINSSITGLYSNEIDILNI

SEQ ID NO: 157 - protein, 1391 aa, Lactobacillus gasseri
MTKIKNEYIVGLDVGTNSCGWVAMDFQNTILRMHGKTAIGSHLFDAGNSAADRRAFRTTRRRIKRRKWRLKLLEEIFDPYMTEVDPYFFARLKESGLSPLDKRKNVSSIVFPTALEDKKFYCNYPTIYHLRYDLMSEDKKFDLREIYLAIHHIVKYRGNFLYNTPVKDFEASKIDVKDSLEKLNELYERLDSEFTVELDSSNALEIEKIIRDKKVFKINKVKSIHQLLSLKTENKERTKLIKDVSKQIINAILGYKTKFETILLKNISKDEADDWEFKLTDVDADNKFENLIGDLNENEQEILLEIRNLANAITLSNIVEEGKTLSESMIDKYNKHSDDLELLKQVISDHPDRDKAKKLALAYDLYVNNRHGKLLQAKDVLGSKKTLSKEDFYKEVKKNLDDSKASQEILDTIALDSFMPKQRTNENGVIPYQLHQLELDRIIKNQGKYYPFLKEVNPVSSHLKEAPYKLDELIRFRVPYYVGPLISPNESTKNKQTKKNQNFAWMIRKEQGQITPWNFDQKVDRMASANKFIKRMTTKDTYLLGEDVLPANSLLYQKFTVLNELNNIKINGKRISVPLKEELYNNLFKKNSTVTTNKLKSYLKENYNLINVEIKGLADEKKFNSGLTTYNKLRNLKIFDQQLDDLNYDKDFERIIEWSTIFEDKAIYKDKLKTIKWLSDRQIDKLSKIRMQGWGQLSKKLLSQLTDNNGQTIIEQLWDSQNNFMQIVNQSDFKDAIAVANQNLLVNTSVEDILNEAYTSPANKKAIRQVVKVVDDIVKAASGKVPKQIAIEFTRDADDKAKISQTRANKLRKVYKELSNELASETIRNELERVAKDQKLLKDKYYLYFMQLGRDAYTGEPINIDDLGQYDIDHILPQSFIKDDSLENRVLVKKAVNNGKSDNVPVKLYGNRMAADLGMTIRHMWEKWKDQGLITKTKYNNLIIDPDKINKYESSGFIHRQLVETSQIIKLVSTILQSKYPDTEIIVVKARYNHYLRKHLNLYKSREVNDYHHAIDAYLSAICGNLLYQVYPYLRPFFVYGQYKKFSSDPKKEKIIYDKTRKYNFISQIFENKSNDIISLETKKKVFDKKDIIEKLKHAYNYKYMLVSRETETHDQEMFKMTVYPRLSRDTKKSRNLISKKKDMPTEIYGGYTNNSDAYMVIARINKKKGTEYRVFGVPMRELVNLRKAEKNGRYNAYLKQVLEPEIMYSKNGKKNKTISSFEIVKAKVPYKQVILDGDKKFMLASSTYVQNAKQLTLSQNSMQAITDNCENDTEEEKALEEKALIEAYDEILTNIDKYLPLFDINKFREKLHAGREKFINLSLDVKKDTILQVLNGLHDNAVMPKIKSLGLSTPLGFMQFSSGVPLSENAKLIYQSPTGLFEKRVKISDL

SEQ ID NO: 158 - protein, 1426 aa, Sphingobacterium spiritivorum
MKHILGLDLGTNSIGWALIKQDFENKQGEILGMGSRIIPMSQDILGDFGKGNSVSQTAERTKYRSVRRLRERFLLRRERLHRILNVLGFLPEHYASQIDFTKRFGKFKEETEPKLVYSNEGFIFKKSFEEMLSDFKTHQPQLLEDNKKIPYDWTIYYLRKKALSRKIEKEELAWILLNFNQKRGYYQLRGEEEEENPNKLIEFYSLKIVDVLADEPQKGKSDIWYSLILENGWIYRRSSKTPLFDWKEKTRDFIVTIDLNDDGSVKTDKEGNEKRSFRAPGENDWTLVKKKTEQEIDSSRKTVGTYIYETLLKNPKQKIKGKLVRTIERKFYKTELKQILEKQKEFHPELRQDDLYSDCVRELYKNNEAHQLTLSKKDFVHLFMEDIIFYQRPLGSQKSSISNCTLEFRKYKDENGTEHTQYLKAIPKSNPYYQEFRIWQWMYNLNIYKKEDDTNVTKDFLNTKADFESLFEFLNNRKEVDQKALLKHFKLNDKTHRWNYVEDKKYPCNETKTMILSRLDKVENISDDFLTREMEQKIWHIIYSVNDKVEYEKALKSFAGKNNLEDNSFFEAFKKFPPFKSEYGAFSEKAIKKLLPLMRMGKFWNYNNISEQSKSRIQKIITGEYDENIKDKVREKAIHLTTETDFQGLQLWLVQYIVYGRHSEAAMLGKWNSADDLEEFLKEFKQHSLRNPIVEQVITETLRVVKDIWQKYGNGAKDFFREIHIELGREMKLPAEERERLTRQISENENTNFRIKALLAEMMDDNSVENVRPFSPMQQEILKIYEEGVLNSDIEIEDDILKISKTAQPSSSDLKRYKLWLEQKYKSPYTGQIIPLNKLFTPEYEIEHIIPQSRYFDDSFTNKIICESAVNKLKDNYIGLEFIKKLGGSIVECGNGKSVAILKHDAYEDFIKKHYANNRSKRNKLLLEDIPEKMIERQMNDTRYISKYISGVLSNIVRVEDGTDEGVNSKNIVPGNGKITTQLKQDWGLNDVWNDLILPRFERMNHLTNSTDFTAWNENHQKFLPTVPVEFSKGFSKKRIDHRHHALDALVIACATKDHVNLLNNQSAKSDTKRYDLKKKLMKFEKVAYNHPQTGERIEREAPKQFLKPWETFTIDAKNHLETIIVSFKQNLRVINKATNYYEKYVEKEGTKVKERVEQKGTNWAIRKPMHKETVSGKIDLPRIKVPKGKILTATRKSLDTSFNLKTIGSITDTGIQKILKNYLQYKDNNPELAFSPEGIEDMNKNIEKFNNGKAHQSISKVRVFELGSKFPLGQSGNKKEKYVEAAKGTNLFFAIYQDKNGKRSYETIPLNEVIERQKQGLSVVDLKGVDDFYLSPNDLVYVPSEDELENISMIDFNKMSSERIYKVVSFTGNQIFFVRQDIATSVVNKAEFSTLNKMERAIDGTMIKETCVKLQIDRLGNISKI

SEQ ID NO: 159 - protein, 1361 aa, Lactobacillus casei; identical to SEQ ID NO: 75

SEQ ID NO: 160 - protein, 1436 aa, Bacteroides fragilis
MKRILGLDLGTNSIGWALVNEAENKDERSSIVKLGVRVNPLTVDELTNFEKGKSITTNADRTLKRGMRRNLQRYKLRRETLTEVLKEHKLITEDTILSENGNRTTFETYRLRAKAVTEEISLEEFARVLLMINKKRGYKSSRKAKGVEEGTLIDGMDIARELYNNNLTPGELCLQLLDAGKKFLPDFYRSDLQNELDRIWEKQKEYYPEILTDVLKEELRGKKRDAVWAICAKYFVWKENYTEWNKEKGKTEQQEREHKLEGIYSKRKRDEAKRENLQWRVNGLKEKLSLEQLVIVFQEMNTQINNSSGYLGAISDRSKELYFNKQTVGQYQMEMLDKNPNASLRNMVFYRQDYLDEFNMLWEKQAVYHKELTEELKKEIRDIIIFYQRRLKSQKGLIGFCEFESRQIEVDIDGKKKIKTVGNRVISRSSPLFQEFKIWQILNNIEVTVVGKKRKRRKLKENYSALFEELNDAEQLELNGSRRLCQEEKELLAQELFIRDKMTKSEVLKLLFDNPQELDLNFKTIDGNKTGYALFQAYSKMIEMSGHEPVDFKKPVEKVVEYIKAVFDLLNWNTDILGFNSNEELDNQSYYKLWHLLYSFEGDNTPTGNGRLIQKMTELYGFEKEYATILANVSFQDDYGSLSAKAIHKILPHLKEGNRYDVACVYAGYRHSESSLTREEIANKVLKDRLMLLPKNSLHNPVVEKILNQMVNVINVIIDIYGKPDEIRVELARELKKNAKEREELTKSIAQTTKAHEEYKTLLQTEFGLTNVSRTDILRYKLYKELESCGYKTLYSNTYISREKLFSKEFDIEHIIPQARLFDDSFSNKTLEARSVNIEKGNKTAYDFVKEKFGESGADNSLEHYLNNIEDLFKSGKISKTKYNKLKMAEQDIPDGFIERDLRNTQYIAKKALSMLNEISHRVVATSGSVTDKLREDWQLIDVMKELNWEKYKALGLVEYFEDRDGRQIGRIKDWTKRNDHRHHAMDALTVAFTKDVFIQYFNNKNASLDPNANEHAIKNKYFQNGRAIAPMPLREFRAEAKKHLENTLISIKAKNKVITGNINKTRKKGGVNKNMQQTPRGQLHLETIYGSGKQYLTKEEKVNASFDMRKIGTVSKLAYRDALLKRLYENDNDPKKAFAGKNSLDKQPIWLDKEQMRKVPEKVKIVTLEAIYTIRKEISPDLKVDKVIDVGVRKILIDRLNEYGNDAKKAFSNLDENPIWLNKEKGISIKRVTISGISNAQSLHVKKDKDGKPILDENGRNIPVDFVNTGNNHHVAVYYRPVIDKRGQLVVDEAGNPKYELEEVVVSFFEAVTRANLGQPIIDKDYKTTEGWQFLFSMKQNEYFVFPNEKTGFNPKEIDLLDVENYGLISPNLFRVQKFSLKNYVFRHHLETTIKDTSSILRGITWIDFRSSKGLDTIVKVRVNHIGQIVSVGEY

SEQ ID NO: 161 - protein, 1517 aa, Bacteroides sp.
MKKIVGLDLGTNSIGWALINAYINKEHLYGIEACGSRIIPMDAAILGNFDKGNSISQTADRTSYRGIRRLRERHLLRRERLHRILDLLGFLPKHYSDSLNRYGKFLNDIECKLPWVKDETGSYKFIFQESFKEMLANFTEHHPILIANNKKVPYDWTIYYLRKKALTQKISKEELAWILLNFNQKRGYYQLRGEEEETPNKLVEYYSLKVEKVEDSGERKGKDTWYNVHLENGMIYRRTSNIPLDWEGKTKEFIVTTDLEADGSPKKDKEGNIKRSFRAPKDDDWTLIKKKTEADIDKIKMTVGAYIYDTLLQKPDQKIRGKLVRTIERKYYKNELYQILKTQSEFHEELRDKQLYIACLNELYPNNEPRRNSISTRDFCHLFIEDIIFYQRPLKSKKSLIDNCPYEENRYIDKESGEIKHASIKCIAKSHPLYQEFRLWQFIVNLRIYRKETDVDVTQELLPTEADYVTLFEWLNEKKEIDQKAFFKYPPFGFKKTTSNYRWNYVEDKPYPCNETHAQIIARLGKAHIPKAFLSKEKEETLWHILYSIEDKQEIEKALHSFANKNNLSEEFIEQFKNFPPFKKEYGSYSAKAIKKLLPLMRMGKYWSIENIDNGTRIRINKIIDGEYDENIRERVRQKAINLTDITHFRALPLWLACYLVYDRHSEVKDIVKWKTPKDIDLYLKSFKQHSLRNPIVEQVITETLRTVRDIWQQVGHIDEIHIELGREMKNPADKRARMSQQMIKNENTNLRIKALLTEFLNPEFGIENVRPYSPSQQDLLRIYEEGVLNSILELPEDIGIILGKFNQTDTLKRPTRSEILRYKLWLEQKYRSPYTGEMIPLSKLFTPAYEIEHIIPQSRYFDDSLSNKVICESEINKLKDRSLGYEFIKNHHGEKVELAFDKPVEVLSVEAYEKLVHESYSHNRSKMKKLLMEDIPDQFIERQLNDSRYISKVVKSLLSNIVREENEQEAISKNVIPCTGGITDRLKKDWGINDVWNKIVLPRFIRLNELTESTRFTSINTNNTMIPSMPLELQKGFNKKRIDHRHHAMDAIIIACANRNIVNYLNNVSASKNTKITRRDLQTLLCHKDKTDNNGNYKWVIDKPWETFTQDTLTALQKITVSFKQNLRVINKTTNHYQHYENGKKIVSNQSKGDSWAIRKSMHKETVHGEVNLRMIKTVSFNEALKKPQAIVEMDLKKKILAMLELGYDTKRIKNYFEENKDTWQDINPSKIKVYYFTKETKDRYFAVRKPIDTSFDKKKIKESITDTGIQQIMLRHLETKDNDPTLAFSPDGIDEMNRNILILNKGKKHQPIYKVRVYEKAEKFTVGQKGNKRTKFVEAAKGTNLFFAIYETEEIDKDTKKVIRKRSYSTIPLNVVIERQKQGLSSAPEDENGNLPKYILSPNDLVYVPTQEEINKGEVVMPIDRDRIYKMVDSSGITANFIPASTANLIFALPKATAEIYCNGENCIQNEYGIGSPQSKNQKAITGEMVKEICFPIKVDRLGNIIQVGSCILTN

SEQ ID NO: 162 - protein, 1399 aa, Olsenella uli
MNLRNTTDEYNIGLDMGTNSVGWAVTDKAGAIAHFKGKPTLGSRLFDAAQTAAGARIHRSQRRRYVRRRWRLDLLQSLFQDEVSKVDSEFFCRLRQSRLYVGDREKGHADYTWPIFNDSDFNEVDYYKRFPTIYHLRKWLMETDEKADIRLIYLATHNIVKHRGNFLRENNKSLSSRDANPAQAVKSLRLALNDWCSERDYECAWKGEEDDGAIDEAILNVLADGEKGRSDQAKEIAKLTGVDCGDAKQSKQCNEAIAKAIVGLKVEMKNIFGEFPAEKTSYIYLSSDEDVEAVRESCPDDSGELFQALCKLYSAYILQELLSYADPSGQTISANMVAKYKQYGRDLRLLKELTRTYAPQKYDLFFRGETYAGSSDYVVDEARGYTRYNLGTTKANYDDFQKSVKELFKGTDALQDERYQEMMVAFGEQKFLRRLKTSDNGSIYYQLHLEELHTILENQGKHYPFLLSEEDKIESLVSFRIPYYVGPLTRKNAAIGHDGKERFAWSSRKDGMEHAVITPWNWEEIIDRDKSAEDFIMRMTGDCTYLQGEPVLPKCSLLYEEFCALNEFNGAHWTVDGDDERRFDAAQRERIMCDLFRRTRSVTYNKVSDWLERKYNFTGARVRGGQGEHGFESKLGSYIFFCKDVFKTDGLDEADYTMIEQIILWSTLFEDRDILKRKIEEAYGGDRLTSEQIKVICKKRFTGWGRLSKRLLTDIKVNTDTGRKSIMDVLREGNPNNGQRSRTMVFMEVLRDEDLGFQKAIDGLNRDYFREHNNGLMDVNDLPGSPAIRRSINQAVRIVDEIASIARKEPTNIFIEVTREEDDPRKKGKRTKRRYDAIKSALEKFKKDDPSLWKELCEKAPGDMDERLSLYFMQRGKCMYSGRPIKIEELHTGKYEVDHIIPRSYIKDDSFENKVLVYREENQHKTDALLIDSSIRQKMGGYWRMLHDAKLVGDKKFRNLFRNHIDDKAMKGFVARQIVETSQMVKLVQTLFEARYPNTRIVPVKAGISHDLREAAGLVKCREANDFHHAHDAFLACRIGLFIQKRHPSVYDNPIGLARIMRDYARMQAREYKKSHCLAHTQGFIVNSFLSSGFDEETGEIFKDDWDAKAEVEGIRRVLNCRQCFISRMPVEGDTRYGGRYWGETIYSPKGKHKHEIPLKQGLDPNLYGGYSDLLYSYFLIYEASDVSSGERVLRFIGIPTSIAARMANQKRLEEYVSRLALQENLEHVRMVRKIMKKQLIEVDNCRLLVTAADAVTNATELAFSLDEMKIISTCAKCINGADPSAIDKIGNAQDSFFDNLKRRGSDRCALLFSQLKLDKLSQNFYMISSDDKSKILISILDRIRAKSNSVDLSLVGGAKHAAQMKFDFNAKLNNPASSFVLIDQSVTGMFERRTRIGL

SEQ ID NO: 163 - protein, 1398 aa, Veillonella atypica
METQTSNQLITSHLKDYPKQDYFVGLDIGTNSVGWAVTNTSYELLKFHSHKMWGSRLFEEGESAVTRRGFRSMRRRLERRKLRLKLLEELFADAMAQVDSTFFIRLHESKYHYEDKTTGHSSKHILFIDEDYTDQDYFTEYPTIYHLRKDLMENGTDDIRKLFLAVHHILKYRGNFLYEGATFNSNAFTFEDVLKQALVNITFNCFDTNSAISSISNILMESGKTKSDKAKAIERLVDTYTVFDEVNTPDKPQKEQVKEDKKTLKAFANLVLGLSANLIDLFGSVEDIDDDLKKLQIVGDTYDEKRDELAKVWGDEIHIIDDCKSVYDAIILMSIKEPGLTISQSKVKAFDKHKEDLVILKSLLKLDRNVYNEMFKSDKKGLHNYVHYIKQGRTEETSCSREDFYKYTKKIVEGLADSKDKEYILNEIELQTLLPLQRIKDNGVIPYQLHLEELKVILDKCGPKFPFLHTVSDGFSVTEKLIKMLEFRIPYYVGPLNTHHNIDNGGFSWAVRKQAGRVTPWNFEEKIDREKSAAAFIKNLTNKCTYLFGEDVLPKSSLLYSEFMLLNELNNVRIDGKALAQGVKQHLIDSIFKQDHKKMTKNRIELFLKDNNYITKKHKPEITGLDGEIKNDLTSYRDMVRILGNNFDVSMAEDIITDITIFGESKKMLRQTLRNKFGSQLNDETIKKLSKLRYRDWGRLSKKLLKGIDGCDKAGNGAPKTIIELMRNDSYNLMEILGDKFSFMECIEEENAKLAQGQVVNPHDIIDELALSPAVKRAVWQALRIVDEVAHIKKALPSRIFVEVARTNKSEKKKKDSRQKRLSDLYSAIKKDDVLQSGLQDKEFGALKSGLANYDDAALRSKKLYLYYTQMGRCAYTGNIIDLNQLNTDNYDIDHIYPRSLTKDDSFDNLVLCERTANAKKSDIYPIDNRIQTKQKPFWAFLKHQGLISERKYERLTRIAPLTADDLSGFIARQLVETNQSVKATTTLLRRLYPDIDVVFVKAENVSDFRHNNNFIKVRSLNHHHHAKDAYLNIVVGNVYHEKFTRNFRLFFKKNGANRTYNLAKMFNYDVICTNAQDGKAWDVKTSMNTVKKMMASNDVRVTRRLLEQSGALADATIYKASVAAKAKDGAYIGMKTKYSVFADVTKYGGMTKIKNAYSIIVQYTGKKGEEIKEIVPLPIYLINRNATDIELIDYVKSVIPKAKDISIKYRKLCINQLVKVNGFYYYLGGKTNDKIYIDNAIELVVPHDIATYIKLLDKYDLLRKENKTLKASSITTSIYNINTSTVVSLSNKVGIDVFDYFMSKLRTPLYMKMKGNKVDELSSTGRSKFIKMTLEEQSIYLLEVLNLLTNSKTTFDVKPLGITGSRSTIGVKIHNLDEFKIINESITGLYSNEVTIV

SEQ ID NO: 164 - protein, 795 aa, Prevotella disiens
MEKQRILGLDPGTNSLGWAVLDFDNSKQEYNLVRKGEVIFEEGVGKSKRGEFSKAAYRTFYKSTRKHYFRRRLRKIEVLKVLVKYDFCPYLSDDLLKQWHEKKIYPAVKEFMDWQRTSDAEGKNPYYDRHCCLNEKLDLSLKSDRYVLGRALYHLTQRRGFKSNRLIQNNDENEEGKVKKGISELSTEMQEANCNYLGDYFYKLYTEKGNTVQIRKRYTDREKHYKNEFNAICEKQELNETIVKELDKAIFFQRKLKPQRHGVGKCTFEPNNRRCAISHPDFERFRMLCFINNIKIKTPFEENLRPLNNEEKALIEPLFYRKSIKNFDFEEIAKKLAGKNNYCYIKDDSSKQYKFNYRMSQGASTCQTIAKLKSIFGEEWKNGIAETYTNRRKKEGLKKQAEMVDDIWNVLYSVSECDVLKDFAINKLQLDEKTADNFSKTKLAQGFATLSLKAIRKILPFLEQGFGYTEAVFLANIPTVVGKEYWNNEDIRNDIMEEIKTIFYHNTLKTNDSHNTILFCIKDILSNNFDLAPGAIDKLYHPSMINVYKDVIPNEDGILQLGSPKIDAVKNPMAMRSLHIIRKVVNELLREGIINSDTEVRIEYARELNDANKRHAIADWQKKQYGKHQKYRKEIKELFKAETGFEIEPNETDILKFELWEEQNHICLYTGQEIGISEFVGENPKYDIEHTIPRSLGGDSTKMNMTLCENKFNRENKQKKLPSELANHSEILERIDDWKKKIYILQKKYDSIRTHNGMDKENKDKKIVSMQVRISGSSICVYSQNTLLWLQYGYN

SEQ ID NO: 165 - protein, 1428 aa, Burkholderiales bacterium
MGKTHIIGVGLDLGGTYTGTFITSHPSDEAEHRDHSSAFTVVNSEKLSFSSKSRTAVRHRVRSYKGFDLRRRLLLLVAEYQLLQKKQTLAPEERENLRIALSGYLKRKGYARTEAETDTSVLESLDPSVFSSAPSFTNFFNDSEPLNIQWEAIANSPETTKALNKELSGQKEADFKKYIKTSFPEYSAKEILANYVEGRRAILDASKYIANLQSLGHKHRSKYLSDILQDMKRDSRITRLSEAFGSTDNLWRIIGNISNLQERAVRWYFNDAKFEQGQEQLDAVKLKNVLVRALKYLRSDDKEWSASQKQIIQSLEQSGDVLDVLAGLDPDRTIPPYEDQNNRRPPEDQTLYLNPKALSSEYGEKWKSWANKFAGAYPLLTEDLTEILKNTDRKSRIKIRSDVLPDSDYRLAYILQRAFDRSIALDECSIRRTAEDFENGVVIKNEKLEDVLSGHQLEEFLEFANRYYQETAKAKNGLWFPENALLERADLHPPMKNKILNVIVGQALGVSPAEGTDFIEEIWNSKVKGRSTVHSICNAIENERKTYGPYFSEDYKFVKTALKEGKTEKELSKKFAAVIKVLKMVSEVVPFIGKELRLSDEAQSKFDNPYSLAQLYNLIETERNGFSKVSLAAHLENAWRMTMTDGSAQCCRLPADCVRPFDGFIRKAIDRNSWEVAKRIAEEVKKSVDFTNGTVKIPVAIEANSFNFTASLTDLKYIQLKEQKLKKKLEDIQRNEENQEKRWLSKEERIRADSHGICAYTGRPLDDVGEIDHIIPRSLTLKKSESIYNSEVNLIFVSAQGNQEKKNNIYLLSNLAKNYLAAVFGASDLSQITNEIESTVLQLKAAGRLGYFDLLSEKERACARHALFLNSDSEARRAVIDVLGSRRKASVNGTQAWFVRSIFSKVRQALAAWTQETGNELIFDAISVPAADSSEMRKRFAEYRPEFRKPKVQPVASHSIDAMCIYLAACSDPFKTKRMGSQLAIYEPINFDNLFTGSCQVIQNTPRNFSDKTNIANSPIFKETIYAERFLDIIVSRGEIFIGYPSNMPFEEKPNRISIGGKDPFSILSVLGAYLDKAPSSEKEKLTIYRVVKNKAFELFSKVAGSKFTAEEDKAAKILEALHFVTVKQDVAATVSDLIKSKKELSKDSIENLAKQKGCLKKVEYSSKEFKFKGSLIIPAAVEWGKVLWNVFKENTAEELKDENALRKALEAAWPSSFGTRNLHSKAKRVFSLPVVATQSGAVRIRRKTAFGDFVYQSQDTNNLYSSFPVKNGKLDWSSPIIHPALQNRNLTAYGYRFVDHDRSISMSEFREVYNKDDLMRIELAQGTSSRRYLRVEMPGEKFLAWFGENSISLGSSFKFSVSEVFDNKIYTENAEFTKFLPKPREDNKHNGTIFFELVGPRVIFNYIVGGAASSLKEIFSEAGKERS

SEQ ID NO: 166 - protein, 1025 aa, gamma proteobacterium
MGGYMPQLMRYRLALDIGSTSIGWAMIRLSMQNEPIAIIRMGVRIFSDGRNPKDGSSLAVTRRVARQMRRRRDRLLKRKTRLLNALVQKKFFPEDADARKALVVLNPYELRKEGLYRQLSGPEFGRALFHISQRRGFLSNRKTDKKDNDSSVLKKAIVDLRQQLEVENCQTIGEWLFKQQQSGKSVRARLRGKTQKDKAYDFYIDRAMIAHEFDTLWVSQAKYDPLLFNEDARAILRDILLYQRPLKPVKPGRCTLIPDESRAPLALPLTQQARIYQELNHLRITTPALGAQALTVAQRNTIAALLEKSDVTFVKIAKALGLTSTTEFNLQDIKRDRLKGNATAIILARNQYFGRRWHDFNADLQNLIVDKLVNEGSETALIEWLKANTDVDESAAERVSGVTLPEGYGSLSVAALRRLLPALKEDVVVYSEAVKRAGFDSHSALSLIEQTGELYQELPYYGEVLQRHVGFGSGDPNDSPERRFGKIANPTVHIGLNELRKIINALIKRYGNPAEVVVELARDLKLSREKRKEIQEEQKQRQDRNEKRIKDACEILGIDPLVIDRGKRREISQKMQLWDELNPKDAANRRCPYTGDQISIEKLLSAEVEIEHILPFSKTLDDSLNNKTVAMRRANRDKGNRTPYEAFGESLNPDYDYDAILQRASLMPREKRKRFASDGYQQWLRDDKDFLSRALNDTAYLSRIAKEYLTLICPPNSVRAIPGRMTAQLRAMFGLNRLLSEGGIKNREDHRHHAIDAAVIGVTDQGLLQKFSRASARTRELQLSRLVDDMPLPWDTYREHVTRALEHLVVSHKPDHGYQGKMHEDTAWGLRDNGQVTRRVRSEDGGPRQRLLENKNVVKINSTRDFSRHGIDEQGQVNAYKGYVGGSNYCIEIWIDEKGKWNSDVVSTFQAYQIVRELGEKAAWQKLRNPLLSLSAKPLVMRLIIDDVVKMQIAGQNKIMRVVKIAQNGQIFFAEHNEANVDARDKDKNNPFKYISKTAGSLQKAGGIHMAISPIGDARPVRYGR

SEQ ID NO: 167 - protein, 1364 aa, Pediococcus acidilactici
MGDRKYNLGLDIGTSSIGFAAVDENNQPIRVKGKTAIGVRLFEEGKTAADRRGFRTTRRRLSRRRWRINLLNEIFDAHLAEVDPTFLARLKESNRSNLDPKKSFQGSLLFPERKDYQFYEEYPTIYHLRKALMEKDRKFDFREIYLAVHHIIKYRGNFLNGTPMRSFKVENIELDTLFDQLNQLYAEIVPDNELAFDLAQVADVKDVLSSTTIYKMDKKKQLVKMMLLPASNKALQSENKKIVTQFVNAILNYKFKLDVLLQVETDADWSLKLNDEGADDKLEEFTGDLDENRLEIIDLLQRLHNWFSLNEITKDGNSLSAAMVEKYENHHHHLGLLKKVIENHPDAKKAKALKETYTAYVGKTDDKTQNQDDFYKAVEKNLDDSPDAKEIKRLIQLDQFMPKQRTGQNGAIPHQLHQQELDQIIEKQSKYYPFLAEPNPNVKRRKDAPYKLDELIAFKIPYYVGPLVTPEEQAQNGENVFAWMKRKAAGPITPWNFDEKVDRMESANRFIRRMTTKDTYLFGEDVLPAESMIYQKFVVLNELNNLKINGRHLSLKDKQDVYNDLFKQQKTVSIKALQNYYVTKKKAATAPTVGGLADPKKFLSSLSTYIDFKNMFGERVNDPQFQEDLEQIVEWSTIFEDRGIFKAKLQALGWLSEKQIQQLVAKRYKGWGRLSKKLLTGLKNAEGYSILDEMWRSTGNFMQIQSRPEFAALIQQANEKQFEGNDPDNVWENIENILGDAYTSPQNKKAIRQVVKVVQDIEKAVGNPPEKIAIEFTREAAANPQRTQSRLRTLEKLYESAEEVVDAGLTAELAEFKENKHVLSDKYYLYFTQLGRDVYTGDTISLDKLNDYDVDHILPQSFIKDDSLDNRVLTIRAVNNGKSDNVPAKMFGKKMGSFWRYLLDNGMISKRKYNNLITDPDNISKYAQKGFINRQLVETSQVIKLTANILNGIYDKDTEIIEVPAKMNSQMRKMFDLVKVREVNDYHHAFDAYLTIFIGNYLYKCYPKLQPYFVYDNFKKFGNKEDIGHKRFNFLGKIEREKKVVAPETGEILWSNVAPNETIKQIKKVYDYKFMIVSREITTRRAELFNQTVYPKNYHGKLIPIKEDRPTDLYGGYSGNTDAYLAIVALEDKKKGKYFKVVGIPTRVAAKLEKLKQQDSQQYLQALHKVIAPQFTKSTKKGIKKTEFEIVLDKVHYRQLVQDGPVKMMLGSSTYKYNAKQLVLSEKALQVIADDRKFDETQKDDNLIAVYDEILSIVNQSFDLYDINGFRKKLNDNRDQFIDLPAETKYEGRKVVAHGKREMILEILKGLHANAAFGNLKPIGFSTAFGQLQVPNGIILSKNAILIHQSPSGLFERKIKLSDL

SEQ ID NO: 168 - protein, 1364 aa, Peptoniphilus duerdenii
MKNLKEYYIGLDIGTASVGWAVTDESYNIPKFNGKKMWGVRLFDDAKTAEERRTQRGSRRRLNRRKERINLLQDLFATEISKVDPNFFLRLDNSDLYREDKDEKLKSKYTLFNDKDFKDRDYHKKYPTIHHLIMDLIEDEGKKDIRLLYLACHYLLKNRGHFIFEGQKFDTKNSFDKSINDLKIHLRDEYNIDLEFNNEDLIEIITDTTLNKTNKKKELKNIVGDTKFLKAISAIMIGSSQKLVDLFEDGEFEETTVKSVDFSTTAFDDKYSEYEEALGDTISLLNILKSIYDSSILENLLKDADKSKDGNKYISKAFVKKFNKHGKDLKTLKRIIKKYLPSEYANIFRNKSINDNYVAYTKSNITSNKRTKASKFTKQEDFYKFIKKHLDTIKETKLNSSENEDLKLIDEMLTDIEFKTFIPKLKSSDNGVIPYQLKLMELKKILDNQSKYYDFLNESDEYGTVKDKVESIMEFRIPYYVGPLNPDSKYAWIKRENTKITPWNFKDIVDLDSSREEFIDRLIGRCTYLKEEKVLPKASLIYNEFMVLNELNNLKLNEFLITEEMKKAIFEELFKTKKKVTLKAVSNLLKKEFNLTGDILLSGTDGDFKQGLNSYIDFKNIIGDKVDRDDYRIKIEEIIKLIVLYEDDKTYLKKKIKSAYKNDFTDDEIKKIAALNYKDWGRLSKRFLTGIEGVDKTTGEKGSIIYFMREYNLNLMELMSGHYTFTEEVEKLNPVENRELCYEMVDELYLSPSVKRMLWQSLRVVDEIKRIIGKDPKKIFIEMARAKEAKNSRKESRKNKLLEFYKFGKKAFINEIGEERYNYLLNEINSEEESKFRWDNLYLYYTQLGRCMYSLEPIDLADLKSNNIYDQDHIYPKSKIYDDSLENRVLVKKNLNHEKGNQYPIPEKVLNKNAYGFWKILFDKGLIGQKKYTRLTRRTPFEERELAEFIERQIVETRQATKETANLLKNICQDSEIVYSKAENASRFRQEFDIIKCRTVNDLHHMHDAYLNIVVGNVYNTKFTKNPLNFIKDKDNVRSYNLENMFKYDVVRGSYTAWIADDSEGNVKAATIKKVKRELEGKNYRFTRMSYIGTGGLYDQNLMRKGKGQIPQKENTNKSNIEKYGGYNKASSAYFALIESDGKAGRERTLETIPIMVYNQEKYGNTEAVDKYLKDNLELQDPKILKDKIKINSLIKLDGFLYNIKGKTGDSLSIAGSVQLIVNKEEQKLIKKMDKFLVKKKDNKDIKVTSFDNIKEEELIKLYKTLSDKLNNGIYSNKRNNQAKNISEALDKFKEISIEEKIDVLNQIILLFQSYNNGCNLKSIGLSAKTGVVFIPKKLNYKECKLINQSITGLFENEVDLLNL

SEQ ID NO: 169 - protein, 1089 aa, Corynebacterium matruchotii
MNSANVNYRVGIDVGSYSLGMAAIAIDDDGKPTEILSAISLIHDSGVDPDSAKSAATRLATSGIARRTRRLYRRKRKRLAKLDKFISSQGWPLKEFEKYEDPFYPWRVRAELATTAITDQQELGEKLSIALRHIARHRGWRNPYSKVTALYTVTEPSDAFLAMQEECAKQLGRTIPETITVGQLVTGMNLGKTRLRGENSLLAARPRQSDNANEIHTIAKVQGLSNELVRQIIDHVFAAESPKGSAAEQVGKDPLQPTKKRALKASDAFQQYRIAALIGNLRIRGGKGNRRLTTEETRLVFDYLRSLPAKQEPTWQLVAEQLKIDRGNLVGTAIMTDDGERAGAKPPVHDTNRIMENTKIKPLATWWKSADADARAAMVKALSNAEVDDFDSQAGAQVQEFFFGISDEDQEKLDGLHLPIGRAAYSEDTLDRLTKRMIGEGMDLYEARQAEFKISNDWAPPAPEIGERVGNPAVDRVLKATARWLNAAERQWGAPKSVNIEHVRAAFMSESSARELDRDNQQRAKRNVKVVAEMQEKLGIEGRPSRADVWRFQSIQRQNGKCAYCGAEISFKNSEMDHIIPQAGEGSTNTRDNLVAVCRECNSSKSNIAFAVWAENTSRPGVSVQKAIERTHHWVTDSGLRKPEFDKFRKQVCDRLRRKATDEPIDARSLESVAWMANELRSRIAQKFKDGDTKVRVYKGALTAEARRASGISGKLEFVDGKGKSRLDRRHHAVDAAVVAFTSNYVAETLALRSNMKFDQELRRKAPQWREFTGSDHVHQVEWTKWKYRMQALAELLNNALVQDRIVVMHNLRLRLGNGAAHEDTIGKLTRLKVGDAISTTDIDRASSEALWCALTRDPDYDPKTGLPENPNRTIRIHGTHLTASDEITVFPVAAASIPIRDGFAKLGSNYHHVRLFRVPSGKKYKYCLMQVYTVDLLKFRKEDLFTVELKPQTISVRTCEALLRKALANGTAEYLGWLVSDDELLIDTSSFDTPGIVKLREEYGPVNRWRLAGLTSVTRLNLRPLYLSKEGLKPNVNPEIKKIIDNRSWIITVNKLFSSGHVKIIRRDALGRPRLHSAAHLPICWEVK

SEQ ID NO: 170 - protein, 1134 aa, Streptococcus mitis
MNGLVLGLDIGIASEGVGILEKNSGKIIHANSRLFPAATADNNVERRKNRQARRLNRRKKHRGVRFQDLFEDYGLLTDFSKVSINLNPYRLRVDGLNQQLTNEELFIALKNIVKRRGISYLDDASEDGGAVSSDYGKAVEENRKLLAEQTPGQIQLERFEKYGQVRGDFTVVENGEKLRLINVFSTSAYKKEAERILRKQQEFNNQITDEFIEDYLKILTGKRKYYHGPGNEKSRTDYGRFRTDGTTLDNIFGILIGKCTFYPEEYRASKASYTAQEFNLLNDLNNLTVPTETKKLSEEQKKVIVEYAKEAKTLGASTLLKYIAKMIDASVDQIRGYRVDVNNKPEMHTFEVYRKMQSLETISVGELSRNVLDELAHILTLNTEREGMEEAINTKLKDSFSQDQVLELVQFRKNNSSLFSKGWHNFSLKLMMELIPELYETSEEQMTILTRLGKQKSKETSKRTKYIDEKELTEEIYNPVVAKSVRQAIKIINEATKKHGIFDNIVIEMARENNEEDAKKDYIKRQKANQDEKNAAMEKAAFQYNGKKELPDNIFHGHKELATKIRLWHQQGEKCLYTGKTIPISDLIYNQYKYEIDHILPLSLSFDDSLSNKVLALATANQEKGQRTPFQALDSMDDAWSYREFKSYVKDLKSLSNKKKDYLLTEEDISKIEVKQKFIERNLVDTRYSSRVVLNALQDFYKSHQFDTTISVVRGQFTSQLRRKWGLEKSRETYHHHAVDALIIAASSQLRLWKKQNNPLITYKEGQFVDSQTGEIISLTDDEYKELVFKAPYDHFVDTLSSKTFEDSILFSYQVDSKFNRKISDATIYATRKAKLDKEKKEYTYTLGKIKDIYSLGTKTPSKTGFYKFLDLYNKDKSQFLMFQKDRKTWDEVIEKIMEQYRPFKEYDKTGKLVDFNPFEKYRQENEPIRKYSKKGNGPEIKSLKYYDILLGKHKNITPEGSRNTVALLSLNPWRTDVYYNMETKKYEFLGLKYADLPFEEGGAYGISTETYNELREKEGIGKNSEFKFTLYKNDLILIKDTETNCQQIFRFWSRTGKDNPKSFEKHKIELKPYEKARFEKGEELEVLGKVPPSSNQLQKNMQIENLSIYKVKTDVLGNKHFIKKEGDKPKLKF

SEQ ID NO: 171 - protein, 1373 aa, Streptococcus bovis
MTKKNYSIGLDIGTNSVGWAVITDDYKVPAKKMKVLGNTDKKYIKKNLLGALLFDSGETAEATRLKRTARRRYTRRKNRLRYLQEIFAEEMTKVDESFFQRLDESFLRWDDDNKKLGRYPIFGNKADVVKYHQEFPTIYHLRKHLADSSEKADLRLVYLALAHMIKFRGHFLIEGELNAENTDVQKIFADFVGVYDRTFDDSHLSEITVDAASILTEKISKSRRLENLIKYYPTEKKNTLFGNLIALALGLQPNFKMNFKLSEDAKLQFSKDSYEEDLGELLGKIGDDYADLFTSAKNLYDAILLSGILIVDDNSTKAPLSASMIKRYVEHQEDLEKLKEFIKANKSELYHDIFKDKNKNGYAGYIENGVKQDEFYKYLKNTLSKIAGSDYFLDKIEREDFLRKQRTFDNGSIPHQIHLQEMHAILRRQGDYYPFLKENQDRIEKILTFRIPYYVGPLARKDSRFSWAEYHSDEKITPWNFDKVIDKEKSAEKFITRMTLNDLYLPEEKVLPKHSHVYETYAVYNELTKIKYVNEQGKDSFFDSNMKQEIFDHVFKENRKVTKEKLLNYLNKEFPEYRIKDLIGLDKENKSFNASLGTYHDLKKILDKAFLDDKVNEEVIEDIIKTLTLFEDKDMIHERLQKYSDIFTADQLKKLERRHYTGWGRLSYKLINGIRNKENNKTILDYLIDDGSANRNFMQLINDDTLPFKQIIQKSQVVGDVDDIEAVVHDLPGSPAIKKGILQSVKIVDELVKVMGDNPDNIVIEMARENQTTNRGRSQSQQRLKKLQNSLKELGSNILNEEKPSYIEDKVENSHLQNDQLFLYYIQNGKDMYTGDELDIDHLSDYDIDHIIPQAFIKDDSIDNRVLTSSAKNRGKSDDVPSLDIVRARKAEWVRLYKSGLISKRKFDNLTKAERGGLTEADKAGFIKRQLVETRQITKHVAQILDARFNTESDENDKVIRDVKVITLKSNLVSQFRKDFEFYKVREINDYHHAHDAYLNAVVGTALLKKYPKLASEFVYGEYKKYDIRKFITNSSDKATAKYFFYSNLMNFFKRVIRYSNGKVIVRPVVEYSKDTEDIAWDKKSNFRTICKVLSYPQVNIVKKVETQTGGFSKESILPKGDSDKLIPRKTKKAYWDTKKYGGFDSPTVAYSVFVVADVEKGKAKKLKTVKELVGISIMERSFFEENPVEFLENKGYHNIREDKLIKLPKYSLFEFEGGKRRLLASASELQKGNEMVIPGHLVKLLYHAQRINSFNSTKYLDYVSAHKKEFEKVLSCVEDFANLYVDVEKNLSKIRAVADSMDNFSIEEISNSFINLLTLTALGAPADFNFLGEKIPRKRYTSTKECLNATLIHQSITGLYETRIDLSKIGEE

SEQ ID NO: 172 - protein, 1099 aa, Corynebacterium accolens
MSLLYRVGIDVGTYSLGCTAIEVDDNDQPVSILSSVSLIHDSGLDPDQQKRAVTRLASSGVARRTRRLYRRRRRRMVKLENFLTAQGWETLPFERYSDPYLPWHARVALVNGYISDDTQRGQYLSIAFRHIANHRGWRNPYWKVSSLYSPDKPSDAFEQIRKELEASTGRQIPETATVGQLISFAQFGKDRLRGGGKQKDKKKPQEQVNQAVISARLHQIDHAREINEICRVQKIDDTLRKQILDLVFAAESPKGAQKGRVGKDPLQPKLFRALKASDAFQQYRIAALTGNLRIYRNGVTVPLDRDEKLIVFNYLVNLPKKEEPSWLKIAEILNIDRGQLRGTATMTDDGERAGATPPVHDTNRTILDSKVKPLAHWWENASDDERAAMLKSLSNSEVEDFDSPAGAQVQAFFADLDETEQEKLDSLHLPMGRAAYSEDTLMRLTNRMLDENLDLYEARLAEFGIPKDWAPPAPRIGEPVGNPAVDRVLKGVARWLEAAADEWGAPKSVVIEHVRDGFVSKSKAIEIDRANNNRHKRNRELFQKMQENLGIEGKVRSSDLWRYQSVQRQNCQCAYCGSPITYTTCEMDHIVPRAGEGSTNTRDNLVATCHRCNLAKKNIPFAVWAEKSTIPGVSVKEALDRTRHWSEDSGMSKKDFQKFRKNVCERLNRTVVDEPLDARSMESVAWMANELRGRVAQRFQEENTTVNVYRGALTAEARRAAGITDKLRFIDGTGKSRLDRRHHAVDAAVVAFIHNYVAETLAIRSNKKREAQLLQGTSQWKEFTGSDDKHRAVWNAWIPKMQKLAVLLQIALDEDRIVVTSNLRLRLGNGRAHEDTISELKTIRVGDAISVTDIDRASSEALWCALTREPDFDEKDGLPENPNRRIRVHGTWYDAEDEIEVFPVGAGAIKVRGGYAKLSRFHHARVYKIPGKKAPIYCMLRVYNTDLVQHRHEDLFSVELKPQTMSVRQAEPKLRKALAENTAEYLGWLVTDDELIIDTSTFRTGLIEEMQSEFGLVRRWRLDGFDSPSLLTLRPLHMSAEGLPDDCALGSRKIIDTKGWRVSINKVFNAGNTTVVRRDALGRARLTSNAHLPISWKEE

SEQ ID NO: 173 - protein, 1054 aa, Actinobacillus pleuropneumoniae
MKLTPLNYILGLDLGIASVGWAVVEIDEQENPLGLIDVGVRTFDRAEVAKTGESLALARRLARSSRRLVKRRADRIKKVKRLLKSENILLSADEQLPNDVWQLRVKGLDQKLERQEWAAVLLHLLKHRGYLSQRKNESKSENKELGALRSGVAANHQILQSAEYRTPAEIAVKKFHVEEGHIRNQRGAYTHTFSRLDLLAEIELLFTRQTELGNPHTSAKLLENLTALLMWQKPALAGEAILKMLGKCTFEPTEYKAAKNSYSAERFVWLTKLNNLRILEQGAERALTDNERFALLDQPYEKAKFTYAQARTMLALPDEAIFKGVRYQGEDKKAVETKTILMEMKAYHQIRKALENADLKAEWNELKNNSELLDDIGTAFSLHKTDEDICRYLDGKLSESILNALLENLNFDKFIQLSLKALQQILPLMLQGQRYDEAVSAIYGDHYGKKSAEINRLLPTIPADEIRNPVVLRTLTQARKVINAVVRLYGSPARIHIETGREVGKSYQDRKKLEKQQEDNRKHRESAVQKFKEYFPNFVGEPKGKDILKMRLYELQQAKCLYSGKSLELHRLLEKGYVEVDHALPFSRTWDDSFNNKVLVLANENQNKGNLTPYEWLDGKNNSEPWQNFVARVQTSGFSHTKKQRILSHKLDEKGFIERNLNDTRYVVRFLCNFIADNMLLTGKGKRKVFASNGQITALLRGRWGLQKVRDDNDRHHALDAVVVACSTVAMQQKITRFVRYEEGNVFSGERIDRETGEIIPLHFPSPWAFFRENVEIRIFSENPKLELENRLPDYPQYNHEFVQPLFVSRMPTRKMTGQGHMETVKSAKRLDEGLSVLKVPLTQLKLNDLERMVNREREMALYESLKVRLEQFDNDPAKAFAEPFYKKGGALVKAVRVEQTQKSGVLVRDGNGVADNASMVRVDVFTKAGKYFLVPIYTWQVAKGILPNKAVTANVDEIDWLEMDESYQFIFTMYPNDLVKVKLKKEEFFGYYGGLDRATGAIVIKEHDLEKSKGRQGIYRIGVKLALSFEKYQVDELGKNIRPCRPTKRQHVR

SEQ ID NO: 174 - protein, 1369 aa, Lactobacillus iners
MNNNYYLGLDLGTNSVGWAVTDDHYNIIKFHGKHMWGMRLFEEAETAKDRRLHRQARRRRQRLVERINLLEELFDKEISKVDQGFFARKKESDLHFEDKTTKSEYALFNDKSYTDRDYYKQYPTIFHLIMDLIENDKKRDIRLVYLACHYLIKHRGHFIFDGKNFTVDNSFENLLDKLITYLKDNDDITLSFPKDQLINIFKNSNLNSTEKSDQLKPFFGRTNLEKGIIKLLSGGKQDLSNMFRDETLKNSNYKNLKFSDNRFDDERDGYAADLGDRIDLLILLKQIYDASILESMMSQARVSIDGHKYISSAKVCAYEKHKSDLKRLKSLIKKYLPSEYNNIFRKITEKDNYVAYSKSNITNNKREKALKYVKYVDFTKYLTKKLKTIKTQDAEDDQEIFEIKGELEKQSFLPKQRTLDNSIIPYQLHLMELKKILDNQSKYYDFLLAKDDQEGITVKDKIISLLTFRLPYYIGPVNPAVHGKFAWVKRLANGKVTPWNYKEKIDIDASHEEFIKTKLSKCSFLIGCDVLPKNSLLYQKYMVLSELNTIKFNGVNISEKLKDDIYQNLFKNIQKVTKKRLQNYIKEHENIIGDVIVTGIDNAFKQGLVSYLKFKKIIGDKVDDDRYQKVLEKIIRDITLYDECAGKKIKKEYKDSDLFTEDELNKIVKLTFNDWGRLSAELLDQLEGEDTVSGETGKIIEFMQKHNYNLMQLMSKKFTFKSKIDEINKSYYQHDKFNYKSMIDSLYVSPATKRILWQSLKVVHEISKIMKHDPEKIFIEMARSKEDHPKRKLSRKADLKQVYKDSKKQIISIIGKDKYQDLSNELDNKDDRDLRWDNLYLYYTQLGRSMYSLKPIDISELMNKNLYDQDHIFPKSKKYDDSIENRVLVEKELNVKKSDIYPISDANIIPQKIKGQVESFWKMLYDHKLIGDKKYARLIRSKAFTDDELAGFIARQLVETRQATKETADLLKRLCPKSRIVYAKAQNASIFRQKFDIPKSRTINDLHHAQDAYLNIVVGNIFDTKFTQDPRNFIKNTKDSRNYNLEKIYDYNVERNNYVAWIAPDGETNGTIANVKCNLSTKDFRVTRPSFYKKGALFNQNLSRKGSNLAPIKEHSPKSNPLKYGGYSGKNNSFFVVVAGKDNKGKDIVKLIPVNTLIYNKMLHCDYKAKQELLTSYVANNFAINNFRIVKDDIKMYSLVKIDGAYYYLVGGTDERIEVKNAMQLLLSKDSIKAVKILEKESKDQFANIKNYKDIDIKLGRTFNEVVSKYTNSVFGKSMLISDKYRKDIFKSVEKSILEFNHLDTIGKADNLLKFVTLMRPSGSAHSLKMVGLIERIRKSNVISNFNEFKLINQSVTGLFENEEDLLKL

SEQ ID NO: 175 - protein, 1420 aa, Bifidobacterium bifidum
MSRKNYVDDYAISLDIGNASVGWSAFTPNYRLVRAKGHELIGVRLFDPADTAESRRMARTTRRRYSRRRWRLRLLDALFDQALSEIDPSFLARRKYSWVHPDDENNADCWYGSVLFDSNEQDKRFYEKYPTIYHLRKALMEDDSQHDIREIYLAIHHMVKYRGNFLVEGTLESSNAFKEDELLKLLGRITRYEMSEGEQNSDIEQDDENKLVAPANGQLADALCATRGSRSMRVDNALEALSAVNDLSREQRAIVKAIFAGLEGNKLDLAKIFVSKEFSSENKKILGIYFNKSDYEEKCVQIVDSGLLDDEEREFLDRMQGQYNAIALKQLLGRSTSVSDSKCASYDAHRANWNLIKLQLRTKENEKDINENYGILVGWKIDSGQRKSVRGESAYENMRKKANVFFKKMIETSDLSETDKNRLIHDIEEDKLFPIQRDSDNGVIPHQLHQNELKQIIKKQGKYYPFLLDAFEKDGKQINKIEGLLTFRVPYFVGPLVVPEDLQKSDNSENHWMVRKKKGEITPWNFDEMVDKDASGRKFIERLVGTDSYLLGEPTLPKNSLLYQEYEVLNELNNVRLSVRTGNHWNDKRRMRLGREEKTLLCQRLFMKGQTVTKRTAENLLRKEYGRTYELSGLSDESKFTSSLSTYGKMCRIFGEKYVNEHRDLMEKIVELQTVFEDKETLLHQLRQLEGISEADCALLVNTHYTGWGRLSRKLLTTKAGECKISDDFAPRKHSIIEIMRAEDRNLMEIITDKQLGFSDWIEQENLGAENGSSLMEVVDDLRVSPKVKRGIIQSIRLIDDISKAVGKRPSRIFLELADDIQPSGRTISRKSRLQDLYRNANLGKEFKGIADELNACSDKDLQDDRLFLYYTQLGKDMYTGEELDLDRLSSAYDIDHIIPQAVTQNDSIDNRVLVARAENARKTDSFTYMPQIADRMRNFWQILLDNGLISRVKFERLTRQNEFSEREKERFVQRSLVETRQIMKNVATLMRQRYGNSAAVIGLNAELTKEMHRYLGFSHKNRDINDYHHAQDALCVGIAGQFAANRGFFADGEVSDGAQNSYNQYLRDYLRGYREKLSAEDRKQGRAFGFIVGSMRSQDEQKRVNPRTGEVVWSEEDKDYLRKVMNYRKMLVTQKVGDDFGALYDETRYAATDPKGIKGIPFDGAKQDTSLYGGFSSAKPAYAVLIESKGKTRLVNVTMQEYSLLGDRPSDDELRKVLAKKKSEYAKANILLRHVPKMQLIRYGGGLMVIKSAGELNNAQQLWLPYEEYCYFDDLSQGKGSLEKDDLKKLLDSILGSVQCLYPWHRFTEEELADLHVAFDKLPEDEKKNVITGIVSALHADAKTANLSIVGMTGSWRRMNNKSGYTFSDEDEFIFQSPSGLFEKRVTVGELKRKAKKEVNSKYRTNEKRLPTLSGASQP

SEQ ID NO: 176 - protein, 1092 aa, Ilyobacter polytropus
MKYSIGLDIGIASVGWSVINKDKERIEDMGVRIFQKAENPKDGSSLASSRREKRGSRRRNRRKKHRLDRIKNILCESGLVKKNEIEKIYKNAYLKSPWELRAKSLEAKISNKEIAQILLHIAKRRGFKSFRKTDRNADDTGKLLSGIQENKKIMEEKGYLTIGDMVAKDPKFNTHVRNKAGSYLFSFSRKLLEDEVRKIQAKQKELGNTHFTDDVLEKYIEVFNSQRNFDEGPSKPSPYYSEIGQIAKMIGNCTFESSEKRTAKNTWSGERFVFLQKLNNFRIVGLSGKRPLTEEERDIVEKEVYLKKEVRYEKLRKILYLKEEERFGDLNYSKDEKQDKKTEKTKFISLIGNYTIKKLNLSEKLKSEIEEDKSKLDKIIEILTFNKSDKTIESNLKKLELSREDIEILLSEEFSGTLNLSLKAIKKILPYLEKGLSYNEACEKADYDYKNNGIKFKRGELLPVVDKDLIANPVVLRAISQTRKVVNAIIRKYGTPHTIHVEVARDLAKSYDDRQTIIKENKKRELENEKTKKFISEEFGIKNVKGKLLLKYRLYQEQEGRCAYSRKELSLSEVILDESMTDIDHIIPYSRSMDDSYSNKVLVLSGENRKKSNLLPKEYFDRQGRDWDTFVLNVKAMKIHPRKKSNLLKEKFTREDNKDWKSRALNDTRYISRFVANYLENALEYRDDSPKKRVFMIPGQLTAQLRARWRLNKVRENGDLHHALDAAVVAVTDQKAINNISNISRYKELKNCKDVIPSIEYHADEETGEVYFEEVKDTRFPMPWSGFDLELQKRLESENPREEFYNLLSDKRYLGWFNYEEGFIEKLRPVFVSRMPNRGVKGQAHQETIRSSKKISNQIAVSKKPLNSIKLKDLEKMQGRDTDRKLYEALKNRLEEYDDKPEKAFAEPFYKPTNSGKRGPLVRGIKVEEKQNVGVYVNGGQASNGSMVRIDVFRKNGKFYTVPIYVHQTLLKELPNRAINGKPYKDWDLIDGSFEFLYSFYPNDLIEIEFGKSKSIKNDNKLTKTEIPEVNLSEVLGYYRGMDTSTGAATIDTQDGKIQMRIGIKTVKNIKKYQVDVLGNVYKVKREKRQTF

SEQ ID NO: 177 - protein, 994 aa, Streptococcus downei
MENQRGKRQRITHQEPYSIGLDIGTASVGSAVINNDLTVPQKRFKVRDINGNVIKTIKKNMSSVLIFDEANPAKGARTKRTSRRRYTRRNFRLLELKKLFEKEIEKIDPNFFHRIKEDSFFNWNDKEFDKHPLFGNLKEEKKFHNNYPTVFHLRNEIGKNSSKKFDLRLVYLALAHIIKYRGHFLDETFDPDASVSVEKRLNDFIVEYNELFDKDLRSEAKFSEILMSDSSNSVKIESTLSLYPSEKNTIFQVFLKLIVGNQGDFNKFFKDELESSSHSGKLVFSSDEVEDEKEELISIIGEDYLDIINLCQSLYSTVALAKIISTDTGESNTPLSASMVKRYNEHKGDLANLKGIVKHFIPEKYEEVFGEHSKTGYTAYIRNPNKMPEKKFYDYLYHEGEKGKISGILSDSRIYELPAVQKFILKIEQKSFLKKQRTKENGLIPYQLHLKELKIIIENQSEYYPFLHEIEEKLEKLLTFRIPYFVGPLAQTKYINPRFNWLVRKSEDHIKPWNFSEIVDEEKSATKFIEKLISNDQFLFGEKVLPKRSIIYQQFLIFNELTKVSYQIKDGPSRNFDSETKEEIFNSLFKKNKLGCVTVVDLKNYIKNDQCLSEKEDIQIEGIKKKFNSSYSTYADLSEISGLKELLDDDTQLDLVEEIIRILTVFEDKKMRTKQLEKLNLPANVDIEKLCKKHYKGWANVSRQLIDGIADRSRGFKKTILDYLKDDDIPNNDAFSTKVQKSLNRNFAQLITDKSLDFARKLDESYKIDVKKDYPSLVEDIPGSPAIRRAILQSLYTVDEIIGVMGRMPKNIVIEMARTNEVSDSPKTRKERIKKLIKETENDADALNFGISKVSEIFDEVKKDENLFKELEVYLYFLQEGKDMYGTETREGHRQPKEINFYDVKNSTGKYHIDHIIPQSLYSGNPLDNIVLTESTNNKIKDKDVPDEATVYEMKNFWLYLMKKGAISKKKFSFLTKIEQGGLSNEDKFGFINR

SEQ ID NO: 178 - protein, 1052 aa, Aminomonas paucivorans
MIGEHVRGGCLFDDHWTPNWGAFRLPNTVRTFTKAENPKDGSSLAEPRRQARGLRRRLRRKTQRLEDLRRLLAKEGVLSLSDLETLFRETPAKDPYQLRAEGLDRPLSFPEWVRVLYHITKHRGFQSNRRNPVEDGQERSRQEEEGKLLSGVGENERLLREGGYRTAGEMLARDPKFQDHRRNRAGDYSHTLSRSLLLEEARRLFQSQRTLGNPHASSNLEEAFLHLVAFQNPFASGEDIRNKAGHCSLEPDQIRAPRRSASAETFMLLQKTGNLRLIHRRTGEERPLTDKEREQIHLLAWKQEKVTHKTLRRHLEIPEEWLFTGLPYHRSGDKAEEKLFVHLAGIHEIRKALDKGPDPAVWDTLRSRRDLLDSIADTLTFYKNEDEILPRLESLGLSPENARALAPLSFSGTAHLSLSALGKLLPHLEEGKSYTQARADAGYAAPPPDRHPKLPPLEEADWRNPVVFRALTQTRKVVNALVRRYGPPWCIHLETARELSQPAKVRRRIETEQQANEKKKQQAEREFLDIVGTAPGPGDLLKMRLWREQGGFCPYCEEYLNPTRLAEPGYAEMDHILPYSRSLDNGWHNRVLVHGKDNRDKGNRTPFEAFGGDTARWDRLVAWVQASHLSAPKKRNLLREDFGEEAERELKDRNLTDTRFITKTAATLLRDRLTFHPEAPKDPVMTLNGRLTAFLRKQWGLHKNRKNGDLHHALDAAVLAVASRSFVYRLSSHNAAWGELPRGREAENGFSLPYPAFRSEVLARLCPTREEILLRLDQGGVGYDEAFRNGLRPVFVSRAPSRRLRGKAHMETLRSPKWKDHPEGPRTASRIPLKDLNLEKLERMVGKDRDRKLYEALRERLAAFGGNGKKAFVAPFRKPCRSGEGPLVRSLRIFDSGYSGVELRDGGEVYAVADHESMVRVDVYAKKNRFYLVPVYVADVARGIVKNRAIVAHKSEEEWDLVDGSFDFRFSLFPGDLVEIEKKDGAYLGYYKSCHRGDGRLLLDRHDRMPRESDCGTFYVSTRKDVLSMSKYQVDPLGEIRLVGSEKPPFVL

SEQ ID NO: 179 - protein, 1023 aa, Helicobacter cinaedi
MKIYSFDIGVASIGWAFIENEVLQDCGIRIFTKAENPKNGASLALPRREARGVRKRLARRRGRLNTIKQLLCKEFGLQLEDYLSNDGELPKAYTASKANPLKSPYELRTLALSQKLDSKDLVRVILHIAKHRGYGNKHAKDSKDTESGKVKKAIEFNRKTLAEKGYRSVGEYLYREFFQQSRISQNNGATEFINVRNKAGNYEHCVAQDMLKEELESILNAQRQFGFSLKQDFENKLLTKIFEQRPLKSFADKVGNCCFIAGEKRAPKDSPSAIEFIALSRTINTLINLSKESGEIYNRAIILQIVESTLKKGEISYKELREIIRLDERLRFKDPRLDYSREIKEAEKVKFLEFKQLKGFKKALGESFTTLAISQLDEIAEHIALIKDRVKLNEKLESYALTKEQREALSNLSFSAHINLSLQALKQILPFMRGDNGEQCLDYDESVEKAGLKALSKDTLKGQMLPPLNEFEPYLSNPVVARALAEYRKVLNVLLKQYGSPHKIHIEYAREAKLSSTERQKYEKEQKDNYAANQAAHKKCQELGLEPSSTNLLKLKLWQEQGGLCLYSGAKITISYLQDPTALQVDHIYPYSRSFDDSYMNKCLVLTKANQEKGNRTPFEAFGTDSAKWGVITTLAQKLPHKKRRRILNTAFNDKEAGFKLRNLNDTSYIARLVADYTETYLEFLPLVESENTTLSKGQKGSKKHIAIVNGVLTSTMRYYLGFASKDRDNHLHHALDAVIIGFMNDSVIKAFSDFKKTQETSKAAYYAHTLSKQEYKKQRAFIQLPSGENFRVSVLEKVESVFVSKPPRKRVRGALHEATFYSPNDPKLLKNYGGTKGVERALALGKMRKVGAKIVSNGAMVRVDIFRHKSSGKFYGVPVYTMDFALGILPNKAVVVGKDQNGVIKDWLEMDSSYEFIFSLYKDDVILVQKKEMQRPELCYFVSFDTSGASIKVAKHDNNFSTLTENQKLLFSNATKEEVVGKSIGIQNLKVFEKWQVSVLGEVKRTQSYPRENISLASKAKK

SEQ ID NO: 180 - protein, 874 aa, Listeria seeligeri
LANGQSEFSWLTRKADGEIRPWNIEEKVDFGKSAIDFIEKMTNKDTYLPKENVLPKHSMCYQKYMVYNELTKIRYTDDQGKTHYFSGQEKQQIFNDLFKQKRKVKKKDLELFLYNMNHVESPTVEGVEDAFNSSFTTYHDLQKVGVPQEILDDPLNTEMLEEIIKILTVFEDKRMINERLQEFSNVLDEAVLKKLERRHYTGWGRLSAKLLIGIRDKESHLTILDYLMNDDKHNRNLMQLINDSNLSFKSIIEKEQVSTADKDIQSIVADLAGSPAIKKGILQSLKIVDELVGIMGYPPQTIVVEMARENQTTGKGKNNSKPRFTSLEKAIKELGSQILKEHPTDNQGLKNDRLYLYYLQNGKDMYTGQELDIHNLSNYDIDHVVPQSFITDNSIDNRVLASSAANREKGDNVPSLEVVRKRKVYWEKLYQAKLMSKRKFDYLTKAERGGLTEADKARFIHRQLVETRQITKNVANILHQRFNCKKDESGNVIEQVRIVTLKAALVSQFRKQFQLYKVREVNDYHHAHDAYLNCVVANTLLKVYPQLEPEFVYGDYHQFDWFKANKATAKKQFYTNIMLFFAKKDRIIDENGEILWDKKYLDTIKKVLNYRQMNIVKKTEIQKGEFSNATANPKGNSSKLIPRKADWDPIKYGGFDGSNMAYAIVIEHEKRKKKTVIKKELIQINIMERTAFEKDQKEFLEGKGYRNPKVITKIPKYTLYECENGRRRMLGSANEAQKGNQMVLPNHLMTLLYHAKNCEASDGKSLAYIESHREMFAELLDSISEFASRYTLADANLEKINTIFEQNKSGDVKVIAQSFVNLLEFNAMGAPASFKYFETNIERKRYNNLKELLNATIIYQSITGLYEARKRLDD

SEQ ID NO: 181 - protein, 1082 aa, Neisseria lactamica
MAAFKPNPMNYILGLDIGIASVGWAMVEIDKEENPIRLIDLGVRVFERAEVPKTGDSLAMARRLARSVRRLTRRRAHRLLRARRLLKREGVLQDADFDENGLVKSLPNTPWQLRAAALDRKLTCLEWSAVLLHLIKHRGYLSQRKNEGETADKELGALLKGVADNAHALQTGDFRTPAELALNKFEKESGHIRNQRGDYSHTFSRKDLQAELNLLFEKQKEFSNPHVSDSLKEGIETLLMAQRPALSGDAVQKMLGHCTFEPAEPKAAKNTYTAERFIWLTKLNNLRILEQGSERPLTDTERATLMDEPYRKSKLTYAQARKLLGLEDTAFFKGLRYGKDNAEAPTLMEMKAYHAISRALEKEGLKDKKSPLNLSTELQDEIGTAFSLFKTDKDITGRLKDRVQPEILEALLKHISFDKFVQISLKALRRIVPLMEQGKRYDEACAEIYGDHYCKKNAEEKIYLPPIPADEIRNPVVLRALSQARKVINCVVRRYGSPARIHIETAREVGKSFKDRKEIEKRQEENRKDREKAAAKFREYFPNFVGEPKSKDILKLRLYEQQHGKCLYSGKEINLVRLNEKGYVEIDHALPFSRTWDDSFNNKVLVLGSENQNKGNQTPYEYFNGKDNSREWQEFKARVETSRFPRSKKQRILLQKFDEEGFKERNLNDTRYVNRFLCQFVADHILLTGKGKRRVFASNGQITNLLRGFWGLRKVRAENDRHHALDAVVVACSTVAMQQKITRFVRYKEMNAFDGKTIDKETGEVLHQKAHFPQPWEFFAQEVMIRVFGKPDGKPEFEEADTPEKLRTLLAEKLSSRPEAVHEYVTPLFVSRAPNRKMSGQGHMETVKSAKRLDEGISVLRVPLTQLKLKGLEKMVNREREPKLYDALKAQLETHKDNPAKAFAEPFYKYDKAGNRTQQVKAVRIEQVQKTGVWVRNHNGIADNATMVRVDVFEKGGKYYLVPIYSWQVAKGILPDRAVVAFKDEEDWTVMDDSFEFRFVLYANDLIKLTAKKNEFLGYFVSLNRATGAIDIRTHDTDSTKGKNGIFQSVGVKTALSFQKNQIDELGKEIRPCRLKKRPPVR

SEQ ID NO: 182 - protein, 1326 aa, Streptococcus pseudoporcinus
MLGTVLFDSGETAQARRLKRTNRRRYTRRRYRLCQLQNIFATEMVKVDDTFFQRLSESFFYYQDKAFDKHPIFGNSKEERAYHKTYPTIYHLRKDLADRDQKADLRLIYLALSHIIKFRGHFLIEGKLNSENTDVQKLFIALVTVYNLLFEEEPIAGETCDAKALLTAKTSKSKRLESLISEFPGQKKNGLFGNLLALALGLRPNFKSNFGLSEDAKLQITKDTYEEELDNLLAEIGDHYADLFLAAKNLSDAILLSDILTLSDENTRAPLSASMIKRYEEHQEDLALLKKLVKEQMPEKYWEIFSNAKKNGYAGYIEGKVSQEDFYRYIKPILSRLKGGDEFLAKIDRDDFLRKQRTFDNGSIPHQIHLKELHAILRRQEKYYPFLAEQKEKIEQLLCFRIPYYVGPLAKGGNSSFAWLKRRSDEPITPWNFKDVVDEEASAQAFIEGMTNYDTYLPEEKVLPKHSPLYEMFTVYNELTKVKYIAENMTKPLYLSAEQKEAIIDHLFKQTRKVTVKDLKEKYFSQIEGLENVDVTGVEGAFNASLGTYNDLLKIIKDKAFLDDEANAEILEEIVLILTLFQDEKLIEKRLAKYANLFEKSVLKKLRKRHYRGWGRLSRQLIDGMKDKASGKTILDFLKADDFANRNFIQLINDSSLDFEKLIDDAQKKAIKRESLTEAVANLAGSPAIKKGILQSLKVVDEIVKVMGHNPDNIVIEMSRENQTTAQGLKNARQRLKKIKEVHKKTGSRILEDNSERITNLTLQDNRLYLYLLQDGKDMYTGQDLDINNLSQYDIDHIIPQSFIKDNSIDNLVLTTQKANRGKSDNVPSIEVVRDMKDRVWRRQLANGAISRQKFDHLTKAERGGLADSDKARFLRRQLVETRQITKHVAQLLDSRFNSKSNQNKKLARNVKIITLKSKIVSDFRKDFGLYKLREVNNYHHAHDAYLNAVVGTALLKKYPKLEAEFVYGDYKHFDLVKLISKSDPSLGKATAKVFFYSNIMNFFKEELSLADGTLMKRPVIETNTETGEVVWDKVKDFKTIRKVLSYPQVNIVKKTEIQSGAFSKESVLSKGNSDKLIERKKGWDPKKYGGFDSPNTAYSIFVVAKVAKRKAQKLKTVKEIVGITIMEQAEYEKDNIAFLEKKGYQDIQEKLLIKLPKYSLFELENGRRRLLASANEFQKGNELALSGKYMKFLYLASRYDKLSSKIESEQQKKLFVEQHLHYFDEILDIVVKHATCYIKAENNLKKIISLYKKKEAYSINEQALNMLNLFIFTSLGAPSTFVFFDETIDRKRYTTSSDVLNGILIQQSITGLYETRIDLSRFGGD

SEQ ID NO: 183 - protein, 1150 aa, Enterococcus faecalis
MYSIGLDLGISSVGWSVIDERTGNVIDLGVRLFSAKNSEKNLERRTNRGGRRLIRRKTNRLKDAKKILAAVGFYEDKSLKNSCPYQLRVKGLTEPLSRGEIYKVTLHILKKRGISYLDEVDTEAAKESQDYKEQVRKNAQLLTKYTPGQIQLQRLKENNRVKTGINAQGNYQLNVFKVSAYANELATILKTQQAFYPNELTDDWIALFVQPGIAEEAGLIYRKRPYYHGPGNEANNSPYGRWSDFQKTGEPATNIFDKLIGKDFQGELRASGLSLSAQQYNLLNDLTNLKIDGEVPLSSEQKEYILTELMTKEFTRFGVNDVVKLLGVKKERLSGWRLDKKGKPEIHTLKGYRNWRKIFAEAGIDLATLPTETIDCLAKVLTLNTEREGIENTLAFELPELSESVKLLVLDRYKELSQSISTQSWHRFSLKTLHLLIPELMNATSEQNTLLEQFQLKSDVRKRYSEYKKLPTKDVLAEIYNPTVNKTVSQAFKVIDALLVKYGKEQIRYITIEMPRDDNEEDEKKRIKELHAKNSQRKNDSQSYFMQKSGWSQEKFQTTIQKNRRFLAKLLYYYEQDGICAYTGLPISPELLVSDSTEIDHIIPISISLDDSINNKVLVLSKANQVKGQQTPYDAWMDGSFKKINGKFSNWDDYQKWVESRHFSHKKENNLLETRNIFDSEQVEKFLARNLNDTRYASRLVLNTLQSFFTNQETKVRVVNGSFTHTLRKKWGADLDKTRETHHHHAVDATLCAVTSFVKVSRYHYAVKEETGEKVMREIDFETGEIVNEMSYWEFKKSKKYERKTYQVKWPNFREQLKPVNLHPRIKFSHQVDRKANRKLSDATIYSVREKTEVKTLKSGKQKITTDEYTIGKIKDIYTLDGWEAFKKKQDKLLMKDLDEKTYERLLSIAETTPDFQEVEEKNGKVKRVKRSPFAVYCEENDIPAIQKYAKKNNGPLIRSLKYYDGKLNKHINITKDSQGRPVEKTKNGRKVTLQSLKPYRYDIYQDLETKAYYTVQLYYSDLRFVEGKYGITEKEYMKKVAEQTKGQVVRFCFSLQKNDGLEIEWKDSQRYDVRFYNFQSANSINFKGLEQEMMPAENQFKQKPYNNGAINLNIAKYGKEGKKLRKFNTDILGKKHYLFYEKEPKNIIK

SEQ ID NO: 184 - protein, 1150 aa, Enterococcus faecalis
MYSIGLDLGVSSVGWSVIDERTGNVIDLGVRLFSAKNSEKNLERRTNRGGRRLIRRKTNRLKDAKKILAAVGFYEDKSLKNSCPYQLRVKGLTEPLSKGEIYKVTLHILKKRGISYLDEDDTEAAKESQDYKEQVRENAQLLTKYTPGQIQLQRLKENNRVKTGINAQGNYQLNVFKVSAYANELATILKTQQAFYPNELTDDWIALFVQPGIAEEAGLIYRKRPYYHGPGNEANNSPYGRWSDFKKTGQPATNIFDKLIGKDFQGELRASGLSLSAQQYNLLNDLTNLKIDGEIPLSPEQKEYILAELMTKEFTRFGINDVAKLLGVKKERLSGWRLDKKGKPEIHTLKGYRNWRKIFAESGIDLATLPTETIDCLAKVLTLNTEREGIENTLAFELPELAESVKLLVLDRYKELSQSVSTQAWHRFSLKTLHLLIPELMNATSEQNTLLEQFQLKSDVRKRYSEYKKLPTKDVLTEIYNPTVNKTVSQAFKVIDALLVKYGKEQIRYITIEMPRDDNEEDEKKRIKELHAKNSQRKNDSQSYFMQKSGWSQEKFQTTIQKNRRFLAKLLYYYEQDGICAYTGLSISPELLVSDSTEIDHIIPISISLDDSINNKVLVLSKANQVKGQQTPYDAWMDGSFKKINGKFSNWDDYQKWVESRHFSHKKENNLLETRNIFDSEQVEKFLARNLNDTRYASRLVLNTLQSFFANQETKVRVVNGSFTHTLRKKWGADLDKTRETHHHHAVDATLCAVTPFVKVSRYHYAVKEETGEKVMREIDFETGEIVDEMSYREFKKSKKYERKTYQVKWPNFREQLKPVNLHPRIKFSHQVDRKANRKLSDATIYSVREKTEVKTLKSGKQKITTDEYTIGKIKDIYTVDGWEAFKKKQDKLLMKDLDEKTYERLLSIAETTPDFQEVEEKNGKVKRVKRSPFAVYCEENDIPAIRKYAKNNNGPLIRSLKYYDGKLNKHINITKDSQGRPVEKTKNGRKVTLQSLKPYRYDIYQDLETKAYYTVQLYYSDLRFVEGKYGITEKEYMKKVAEQTKGQVVRFCFSLQKNDGLEIEWKDSQCYDVRFYNFQSANSINFKGLEQEMMPAENQFKQKPYNNGAINLNIAKYGKEGKKLRKFNTDILGKKHYLYYEKEPKNIIK

SEQ ID NO: 185 - protein, 1345 aa, Streptococcus anginosus
MDQKYSIGLDIGTNSVGWAVVTDDYKVPAKKMKVLGNTDKQSIKKNLLGALLFDSGETAEATRLKRTARRRYTRRRNRLRYLQEIFAEEMNKVDENFFQRLDDSFLVDEDKRGERHPIFGNIAAEVKYHDDFPTIYHLRKHLADISQKADLRLVYLALAHMIKFRGHFLIEGQLKAENTNVQALFKDFVEVYDKTVEESHLSEMTVDALSILTEKVSKSRRLENLIAHYPAEKKNTLFGNLIALSLGLQPNFKTNFQLSEDAKLQFSKDTYEEDLEGLLGEIGDEYADLFASAKNLYDAILLSGILTVDDNSTKAPLSASMVKRYEEHQKDLKKLKDFIKVNAPDQYNAIFKDKNKKGYAGYIENGVKQDEFYKYLKGILLQINGSGDFLDKIDREDFLRKQRTFDNGSIPHQIHLQEMHAILRRQEEHYPFLKENQDKIEKILTFRIPYYVGPLARKGSRFAWAEYKADEKITPWNFDDILDKEKSAEKFITRMTLNDLYLPEEKVLPKHSLLYETFTVYNELTKVKYVNEQGEAKFFDANMKQEIFDHVFKENRKVTKDKLLNYLNKEFEEFRIVNLTGLDKENKAFNSSLGTYHDLRKILDKSFLDDKANEKTIEDIIQTLTLFEDREMIRQRLQKYSDIFTKAQLKKLERRHYTGWGRLSYKLINGIRNKENKKTILDYLIDDGYANRNFMQLINDDALSFKEEIARAQIIGDVDDIANVVHDLPGSPAIKKGILQSVKIVDELVKVMGHNPANIIIEMARENQMTDKGRRNSQQRLKLLQDSLKNLDNPVNIKNVENQQLQNDRLFLYYIQNGKDMYTGETLDINNLSQYDIDHIIPQAFIKDNSLDNRVLTRSDKNRGKSDDVPSIEVVHEMKSFWSKLLSVKLITQRKFDNLTKAERGGLTEEDKAGFIKRQLVETRQITKHVAQILDERFNTEFDGNKRRIRNVKIITLKSNLVSNFRKEFELYKVREINDYHHAHDAYLNAVVGNALLLKYPQLEPEFVYGEYPKYNSYRSRKSATEKFLFYSNILRFFKKEDIQTNEDGEIAWNKEKHIKILRKVLSYPQVNIVKKTEEQTGGFSKESILPKGESDKLIPRKTKNSYWNPKKYGGFDSPVVAYSILVFADVEKGKSKKLRKVQDMVGITIMEKKRFEKHPVDFLEQRGYRNVRLEKIIKLPKYSLFELENKRRRLLASARELQKGNELVIPQRFTTLLYHSYQIEKNYEPEHREYVEKHKDEFKELLEYISVFSRKYVLADNNLTKIEMLFSKNKDAEVSSLAKSFISLLTFTAFGAPAAFNFFGENIDRKRYTSVTECLNATLIHQSITGLYETRIDLSKLGED

SEQ ID NO: 186 - protein, 849 aa, Listeria ivanovii
  misc_feature (780)..(780): Xaa can be any naturally occurring amino acid
LIDKNGTPQHITMIDKMRGKCTYFPEEVRIAKMSYTAELFGLLNDFNNIYFADPETGEKIGFTEADKKYFIDTFIHDQKGVKNITLKQIMKHKNIINETDIFGYRINTKNGTPIFTEFKGLKALKKALKEVDLPDEFYQNTEMMDEIANILSSEKSFTRREEQLKELFLAAFNDELEEAVKELINDITFKEFHSLSKKAIMVILPELWSTNQNQMQLFVQHKMDKSRLENLQNGTKIQFDDEAILSTIAKRAHRETIKIVDAVRAKYGELDYVIVEMAREKNSDEQKKVYNRAQKKQGDFEKEMCKLLGVSELKELRLNGKQHLALKFWKEQDGKCIYSGKPIALSDIVNNFNGLLEIDHIIPISISYDDSQQNKVLCLRSENQRKGQLSPYQYLIRGMGERSFDAFKAEVLSRHFGKKKQNYLLEMEDIANNDELRKHFINRNLVDTRYAMRTFSNTLKTFYTVNGIPTKVMPVNGAMTSALRKRAKLNKDRDAGHAHHAIDALIVAAIGRLPLIKQLAELRVNEEGEFADKITDKGLDDKTAFDDKTLKFLRNLLNYESKVKYSHKVDRKPNRSLSKQTLYSTREKDGEKYIIGKVKNIYTLDKAGYAALKKRIDKNPEDFLMAQHNPKTWEEIIKIMEVYSKADNPFKEFYDEHGFIMKDGKVPVKSLRYHDKKLGIHVPLTHKYENTRHDVVLLKRNSLRVDIYMNKEGVYKYQGVPYNWFNQKGDKYILDMEKYHNEIDGTRASFKNIDNTFEFQFSLYKNDVFSYMKKDKEGEXVSYTKLFRSDSSPRENRLEVENIDMRTSSQQMPTINPLKNLIKYNTDILGNTYPIQKEKFVTVFTLHSK

SEQ ID NO: 187 - protein, 1457 aa, Prevotella buccae
MKTILGLDLGTNSIGWAKVSVDDYGNYLHDIKLGSRIIPMSQDVLGNFDSGVTVSQTAQRTEFRSKRRLVQRNLQRRERLHRVLHVLDFLPAHYDAAIGWDRTEAVTYGKFLNHAEPKLAWEELGNGKRRFLFMDSFHEMVADFARCQPALVADGKKIPLDWTIYYLRKKALTQAITKEELAWILLNFNQKRGYYQLRGEEEEENPTKQEEYYELKVVSVEATDSRKGNDTWYNVHLENGWIYRRSSKISLDDWVGKVKQFIVTTEYEKDGATLKTDKEGYVKRSFRAPNENDWGLRKKRTETLLEMSGKTVGAFIYDHLLQEPADKIRGNFIRTIERHYYKAELEAILAEQCKYHIELRDKEMLEACARELYLNNLPHQRSLMKKDMTYLLLYDLIFYQRPLKSKKALIANCPYEYYEYVDKETGEIKRQNIKCIAKSNPYFQEFRLWQFVLNLRLFDRVEDKEVTANYLPTADDHARLFTYLNDRKEINQETLLKDYFKLKKVKIGNEKEYPIRWNYIEDKEKKYPCNETRYELLMALDRAGIEHKWLDDNNLEYRLWHLLYSVEVKSESETALRKLKNDDAFVNSFLKVKPFKKEYGAYSEKAIKRLLAVMRKGFLWNEQDICDETRKRIEIIIKGDVDEKVKERMGHAAYSFDRVSDFQGLPEWLACYVVYGRHSEAMDIQHWDSPERLMAYINNFKQYSLRNPIVEQCILETLRTVHDIWKETGQIDEIHVELGREMKSTSEERARRTQNVLRNENTNLRIKSLLIELKNDTDICNVHPYSPMQQEILRIYEEGALQELNREDEDFEEISKISQMSQPSGKELNRYKLWLEQKYRSPYTGKAISLAKLFTPAYQIEHVIPQSRYFDDSFTNKVICEAEVNTLKSNLLGYEFIKKHGGEIIHCTTLGDVRIFSESEYKAFVMDHYANNKSKKDKLLMEDIPQEFLSRQMNDSRYISKVVKTLLSNIVRMADESEATSKSVIVCTGGVTDRLKKDWGLNDVWNSIVYSRFERLNRLTGTEAFGHWENKDGKRVFQTSMPLELQRGFRKKRIDHRHHAMDALVIACASRNIVNYLNNESANNPKKREDLRRQLCDKNRVIRKPWETFTQDAYNALENVVVSFKNYVRVINKATNRYEHYDENGKKRFVQQKGSELWAIRKPMHKETYYGHVNLRRKELVTLQKALDDIPSICDKKLRDYISALVEKHFNKRQLLAHFKSTDYYWQKQYVNKVYVWTFSDDIKPLVATRKLLDTSFDAKRIGTITDTGIQKILRNYLEAKGGNATLAFTPEGIAEMNQNISKYNDGKPHQPILKVRITEPMGAKYRVGQTGNKMAKYVEAQSGTNLYFAIYEDSEGKRSYTTVPLDEVAERLKQRLSPVPEKDENDVPLKFYLSPNDLVYVPTEEELQLRECKLNKDRIYKMVSSTGNECHFIPYYVANVIYNKGGFNMQMHRPQS

SEQ ID NO: 188 - protein, 1330 aa, Enterococcus italicus
MKNDYTIGLDIGTNSVGYSVVTDDYKVISKKMNVFGNTEKKSIKKNFWGVRLFESGQTAQEARMKRTSRRRIARRKNRICYLQEIFQPEMNHLDNNFFYRLNESFLVADDAKYDKHPIFGTLDEEIHFHEQFPTIYHLRKYLADGDEKADLRLVYLAIAHIIKFRGNFLIEGELNTENNSVIELSKVFVQLYNQTLSELEGFQFIDESIDFSEVLTQQLSKSERADNVLKLFPDEKGTGIFAQFIKLIVGNQGNFKKVFQLEEDQKLQLSTDDYEENIENLLAIIGDEYGDIFVAAQNLYQAILLAGILTSTEKTRAKLSASMIQRYEEHAKDLKLLKRFVKEHIPDKYAEIFNDATKNGYAGYIDGKTKEEEFYKYLKTTLVQKSGYQYFIEKIEQENFLRKQRIYDNGVIPHQVHAEELRAILRKQEKYYSFLKENHEKIEQIFKVRIPYYVGPLAKHNEQSRFAWNIRKSDEPIRPWNMNDVVDENASAVAFIERMTIKDIYLNENVLPRHSLIYEKFTVFNELTKVLYADDRGVFQRFSAEEKEDIFEKLFKSERKVTKKKLENYLRIELSISSPSVKGIEEQFNANFGTYLDLKKFDELHPYLDDEKYQDTLEEVIKVLTVFEDRSMIQNQLEQLPLNLSTKTIKALSRRKYTGWGRLSARLIDGIHDKNSGKTILDYLIEDESDSYIVNRNFMQLINDDHLSFKKIIEDSQPYKEQQSAEEIVSELSGSPAIKKGILQSLKIVDELVAIMGYKPKNIVVEMARENQTTGRGKQNSKPRLKGIENGLKEFSDSVLKGSSIDNKQLQNDRLYLYYLQNGKDMYTGHELDIDHLSTYDIDHIIPQSFLTDNSIDNRVLTTSKSNRGKSDNVPSEEVVRKMDRFWRKLLNAKLISERKYTNLTKKELTESDKAGFLKRQLVETRQITKHVATILDSKFNEDSNNRDVQIITLKSALVSEFRKTFNLYKVREINDLHHAHDAYLNAVVALSLLRVYPQLKPEFVYGEYGKNSIHDQNKATIKKQFYSNITRYFASKDYIINDDGEILWNKQETIAQVIKTLGMHQVNVVKKVEIQKGGFSKESIQPKGESQKLIRRKQQWNTKKYGGFDSPVVAYAILLSFDKGKRKARSFKIVGITIQDRESFEGNPILYLSKKDYHNPKVEAILPKYSLFEFENGRRRMVASASETQKGNQLIIPGHLMELLYHSKKIINGKNSDSVSYIQNNKEKFREIFEYIVDFSSKYISADANLNKIEKIFENNFHKASEQEIAKSFINLLTFTAMGAPADFEFFGEKIPRKRYVSISEIIDAVFIHQSITGLYETRVRLTEV

SEQ ID NO: 189 - protein, 1123 aa, Mobiluncus curtisii
MFVYLNSPRGFGPATFLTDLPHFCIIFGNNDFMDNRKYHVGIDVGTNSVGFAAVEVGDSGSPIRFLNTMVVIHDSGVDPEQKKYAITRLASAGTARRTRRLYRTRRQRLRELDDFISNELGYPLVNLENFADPYEPWKVRADLATIKLPADELPEAMSIALRHMARHRGWRSPYQRVEALHLHAEISEEFSALKKRVMEKTGDVFSDDATPAEVLVDLMGRQKIRGADGMLSGKLRQSDNANELRKIASVQGIDDETLNRIIDRVFFSRSPKGKASERVGMDALPGQGSKPRALKAMPSFQKFRIVSVICNLRIKDSGDDNRPLSMEEKEQLIGYLMSSTTDDHVTWTDVAELLHVKRSNLQGTAKEGPDGERPYTRPPVNSAWSKIKDSKIKSLVALWKTGDVDVQSAIVEALSNASVLEDARPGADIVVAYLESLDDKELESLDKVGLPAGRASYSEDSLERLTERMLQDDCDLFEARKREFGVSDDWKPPADPIYAPVGNPGVDRVLKIVNRLLMAAEREWGAPTQINIEHVRSGFSSELMQREFERENERRRAQNEEAVKAILTEKGGNSHVSKYDIIRYYAVKRQNCQCLYCGTPITFSDCELDHIVPRKGVGSTNSRVNLAAACRSCNRDKSNLPFAVWAGKTSNFDVSIDGAVSRVKQWQRSQNEGAREFRAFQNEVISRLLKTTEDPEIDSRSLESVAWMARELHHRVEYYFQSKGAQTQVSVYRGAVTAQARKSSGLEDKVKMIGGGGKTRLDRRHHAMDAATIALMTPGISTTLSEKNNLRDAQKFTGQSETWKDYCGRTETAREHFAVWKSNMERLTDLFNDKLENDAIPVVQPLRLRLSDSKAHDDGIGKLDSKKLGSVWSLADIDRAATPQIWTALTRCDDFDPTKGLPENANRVIRAQGVKYESEDNIPVFPSNVAAIAVRDGYAEIGSTIHHARIYRIDDGKKIFYSMIRVFAVDLLKHQAEDLFTVKLPPSAISIRTCEDSLRRALSNGTAEYLGWLVPGDEIIVDTSDKAFHTGQIGDLLRNFPVNSFRLTGFPSNSRLRLKPVLLAGEGLRDDAEDSIKKILSGQGWRPAINVLFSKGKPRIVRRNSLGIERPSSNNGLPFSWEA

SEQ ID NO: 190 - protein, 1054 aa, Staphylococcus lugdunensis
MNQKFILGLDIGITSVGYGLIDYETKNIIDAGVRLFPEANVENNEGRRSKRGSRRLKRRRIHRLERVKKLLEDYNLLDQSQIPQSTNPYAIRVKGLSEALSKDELVIALLHIAKRRGIHKIDVIDSNDDVGNELSTKEQLNKNSKLLKDKFVCQIQLERMNEGQVRGEKNRFKTADIIKEIIQLLNVQKNFHQLDENFINKYIELVEMRREYFEGPGKGSPYGWEGDPKAWYETLMGHCTYFPDELRSVKYAYSADLFNALNDLNNLVIQRDGLSKLEYHEKYHIIENVFKQKKKPTLKQIANEINVNPEDIKGYRITKSGKPQFTEFKLYHDLKSVLFDQSILENEDVLDQIAEILTIYQDKDSIKSKLTELDILLNEEDKENIAQLTGYTGTHRLSLKCIRLVLEEQWYSSRNQMEIFTHLNIKPKKINLTAANKIPKAMIDEFILSPVVKRTFGQAINLINKIIEKYGVPEDIIIELARENNSKDKQKFINEMQKKNENTRKRINEIIGKYGNQNAKRLVEKIRLHDEQEGKCLYSLESIPLEDLLNNPNHYEVDHIIPRSVSFDNSYHNKVLVKQSENSKKSNLTPYQYFNSGKSKLSYNQFKQHILNLSKSQDRISKKKKEYLLEERDINKFEVQKEFINRNLVDTRYATRELTNYLKAYFSANNMNVKVKTINGSFTDYLRKVWKFKKERNHGYKHHAEDALIIANADFLFKENKKLKAVNSVLEKPEIESKQLDIQVDSEDNYSEMFIIPKQVQDIKDFRNFKYSHRVDKKPNRQLINDTLYSTRKKDNSTYIVQTIKDIYAKDNTTLKKQFDKSPEKFLMYQHDPRTFEKLEVIMKQYANEKNPLAKYHEETGEYLTKYSKKNNGPIVKSLKYIGNKLGSHLDVTHQFKSSTKKLVKLSIKPYRFDVYLTDKGYKFITISYLDVLKKDNYYYIPEQKYDKLKLGKAIDKNAKFIASFYKNDLIKLDGEIYKIIGVNSDTRNMIELDLPDIRYKEYCELNNIKGEPRIKKTIGKKVNSIEKLTTDVLGNVFTNTQYTKPQLLFKRGN

SEQ ID NO: 191 - protein, 586 aa, Pseudoramibacter alactolyticus
MTYYLGLDMGTGSVGWAATDKNYKLIRAKGKDLWGVRLFQTAKTAAERRSHRVARLRRQREKVRIGYLKTIFSDAINKVDPGFFQRLDDSFFYAEDKNINQPYALFADTGYTDVDYYRDYPTIFHLRSTLIHDTSPKDVRLVYLAVLNMFKHRGHFLASNLSENGVDDFGDIYQQWCKSVPKPVQISDPEAKTEKIENILSKAGISNTRRLEALLEVFGIKRRDAFAEVLKLWCGLKGNLSKIWSETDFSDLDNTKPALSFKDSNLDMVLSQLEEILPDEDYSWLMLTKQIYDWSLLSGMMKDASGKSYDYLSDARVASYQKHSEDLKTLKRFYHDNHLSAAYDQMFRVMGKDNYSAYAGSVQSKKEVVRRGASCGIEELYKRIKKDLKPVPDCETKQIILENIERGTFLPKQLTRDNGVIPNQIHVHELKAILKNAENYLPFLKEGSELTNSEKILQLFQFQIPYYVGPLYSDENNYAWVVRKEGGRVFPWNFAEKVDEKASAEGFISELVARCTYLDNEKVLPKASLLYEKFMVLNELNNLRINGERISVDIKQELYQNLFTRGKKVTLKKSEGLFGGQRIFCL

SEQ ID NO: 192 - protein, 1385 aa, Gemella morbillorum
MKNKTWYLGLGVGPTSIGWAATDSNYKLLRKNKKRLWGVRLFEEAKTAVDRRTFRAERRRLARRKWRISLLEELFAKEVSKNDPNFFLRLKESKYHFEDKSLMNEYILFNDKDYTDKDYYKEYPTIYHLRLSLTTEENPDIRKVYLAVHSMLKNRGHFLLQGQSFNDSNIDSVIKELLELETVKINFEVTDEVIHSLKKIALEKKNLSDKNNDVKKLYPKEKQLQEIFKLVFGGKTSLDKLYDIEEYKELDNSVKSISFKEKVYEEVRPDYEQILSNYIELLDLAKLVYDSIVLADIKKEGKTISESKVELYNKHKDDLANLKKLVKIDSKLSEDKKKEVYFTIFKEDKEKGTNYVNYTHRSQEGKSCSYEDFKKFLKKELEKLEDSPTKTTILEELDLETFLPLQRTKDNSVVPYQIHKEELVKILDNAAKYHSFLAEKDDSGYSTREKVVQLFEFRIPYYIGPLNAHHNTENGGYSWAIRKKGMESVPVTPWNFKDVIDESASAEAFVNNLKNKCAYLSGEDVLPKNSLLYSEYALLNELNALRYEGNRISVEARDVIVTKLFKEQGKKVTKKTIKELLKTEGFIDGKGEIVGIDNIVKNDLKSYRDFKKILADKFDKERVENIILWITLYGESRKLIKEKITKVYGDFYTVDEIEKMSRLTYKDWGILSRKLLTELVSEKLYNEETGECLNIIGAMRQGTILFMELLADKFDYMSQIKNHNKENKDDITEITPDILENLHASPAVKRSIWQTVRIVEELKTIIGCVPTKIFIETTKRNNAPYKVPTLNRNDLVTKYKTIREHEIFELEKELKNTLDFTLNKNRLINEEPSKLKATKLYLYYTQLGRCMYTGKKIDLGELFDNNNKYDIDHIYPQSKVKDGSFNNIVLVTKASNDMKADVFPLKSKFQTKENKIFWRFLKEKKLITEEKYNRLVRTEEFSNGELTGFITRQLVETSQAIKVISNVLRELNPETTICYSKAENVSSFRQSFGKIKEANRKAENNEKLIRVQEINDYYNAKDAYLSIVVGNVYDVKFTRNVHNFIKNNKDARRYSLNGLFYTDVKNANTIAWEMDKTVHVVEKTMNNNNILITRRTSEQKGALYDATLYKAKVAEKAKEGTYYPLKTTDSKIKDVGKYGGFTKIKIAYYSIFEYTLDGKKGKQKITRIVPIPIYISQNIKDDKALLEYAQTRLPGKDLKIKYRKLCIGSLVKINNFNYYIGGKTNNNFTFDSAVQVILDKDSESYIKELAKYLNWKKENKDGKLWESITEDKNIQLYDSLVKKMNTGIFIRKTPNKYTELLTLEVKNKFINIDIDEQVKLLLEILNLLTNKKFTSKLNEIGITASRGVCSFNLSNQSQFSIIEQSVTGVYEKEKLIIEKKKEGIL

SEQ ID NO: 193 - protein, 1029 aa, Alicycliphilus denitrificans
MRSLRYRLALDLGSTSLGWALFRLDACNRPTAVIKAGVRIFSDGRNPKDGSSLAVTRRAARAMRRRRDRLLKRKTRMQAKLVEHGFFPADAGKRKALEQLNPYALRAKGLQEALLPGEFARALFHINQRRGFKSNRKTDKKDNDSGVLKKAIGQLRQQMAEQGSRTVGEYLWTRLQQGQGVRARYREKPYTTEEGKKRIDKSYDLYIDRAMIEQEFDALWAAQAAFNPTLFHEAARADLKDTLLHQRPLRPVKPGRCTLLPEEERAPLALPSTQRFRIHQEVNHLRLLDENLREVALTLAQRDAVVTALETKAKLSFEQIRKLLKLSGSVQFNLEDAKRTELKGNATSAALARKELFGAAWSGFDEALQDEIVWQLVTEEGEGALIAWLQTHTGVDEARAQAIVDVSLPEGYGNLSRKALARIVPALRAAVITYDKAVQAAGFDHHSQLGFEYDASEVEDLVHPETGEIRSVFKQLPYYGKALQRHVAFGSGKPEDPDEKRYGKIANPTVHIGLNQVRMVVNALIRRYGRPTEVVIELARDLKQSREQKVEAQRRQADNQRRNARIRRSIAEVLGIGEERVRGSDIQKWICWEELSFDAADRRCPYSGVQISAAMLLSDEVEVEHILPFSKTLDDSLNNRTVAMRQANRIKRNRTPWDARAEFEAQGWSYEDILQRAERMPLRKRYRFAPDGYERWLGDDKDFLARALNDTRYLSRVAAEYLRLVCPGTRVIPGQLTALLRGKFGLNDVLGLDGEKNRNDHRHHAVDACVIGVTDQGLMQRFATASAQARGDGLTRLVDGMPMPWPTYRDHVERAVRHIWVSHRPDHGFEGAMMEETSYGIRKDGSIKQRRKADGSAGREISNLIRIHEATQPLRHGVSADGQPLAYKGYVGGSNYCIEITVNDKGKWEGEVISTFRAYGVVRAGGMGRLRNPHEGQNGRKLIMRLVIGDSVRLEVDGAERTMRIVKISGSNGQIFMAPIHEANVDARNTDKQDAFTYTSKYAGSLQKAKTRRVTISPIGEVRDPGFKG

SEQ ID NO: 194 - protein, 1422 aa, Sutterella wadsworthensis
MTQSERRFSCSIGIDMGAKYTGVFYALFDREELPTNLNSKAMTLVMPETGPRYVQAQRTAVRHRLRGQKRYTLARKLAFLVVDDMIKKQEKRLTDEEWKRGREALSGLLKRRGYSRPNADGEDLTPLENVRADVFAAHPAFSTYFSEVRSLAEQWEEFTANISNVEKFLGDPNIPADKEFIEFAVAEGLIDKTEKKAYQSALSTLRANANVLTGLRQMGHKPRSEYFKAIEADLKKDSRLAKINEAFGGAERLARLLGNLSNLQLRAERWYFNAPDIMKDRGWEPDRFKKTLVRAFKFFHPAKDQNKQHLELIKQIENSEDIIETLCTLDPNRTIPPYEDQNNRRPPLDQTLLLSPEKLTRQYGEIWKTWSARLTSAEPTLAPAAEILERSTDRKSRVAVNGHEPLPTLAYQLSYALQRAFDRSKALDPYALRALAAGSKSNKLTSARTALENCIGGQNVKTFLDCARRYYREADDAKVGLWFDNADGLLERSDLHPPMKKKILPLLVANILQTDETTGQKFLDEIWRKQIKGRETVASRCARIETVRKSFGGGFNIAYNTAQYREVNKLPRNAQDKELLTIRDRVAETADFIAANLGLSDEQKRKFANPFSLAQFYTLIETEVSGFSATTLAVHLENAWRMTIKDAVINGETVRAAQCSRLPAETARPFDGLVRRLVDRQAWEIAKRVSTDIQSKVDFSNGIVDVSIFVEENKFEFSASVADLKKNKRVKDKMLSEAEKLETRWLIKNERIKKASRGTCPYTGDRLAEGGEIDHILPRSLIKDARGIVFNAEPNLIYASSRGNQLKKNQRYSLSDLKANYRNEIFKTSNIAAITAEIEDVVTKLQQTHRLKFFDLLNEHEQDCVRHALFLDDGSEARDAVLELLATQRRTRVNGTQIWMIKNLANKIREELQNWCKTTNNRLHFQAAATNVSDAKNLRLKLAQNQPDFEKPDIQPIASHSIDALCSFAVGSADAERDQNGFDYLDGKTVLGLYPQSCEVIHLQAKPQEEKSHFDSVAIFKEGIYAEQFLPIFTLNEKIWIGYETLNAKGERCGAIEVSGKQPKELLEMLAPFFNKPVGDLSAHATYRILKKPAYEFLAKAALQPLSAEEKRLAALLDALRYCTSRKSLMSLFMAANGKSLKKREDVLKPKLFQLKVELKGEKSFKLNGSLTLPVKQDWLRICDSPELADAFGKPCSADELTSKLARIWKRPVMRDLAHAPVRREFSLPAIDNPSGGFRIRRTNLFGNELYQVHAINAKKYRGFASAGSNVDWSKGILFNELQHENLTECGGRFITSADVTPMSEWRKVVAEDNLSIWIAPGTEGRRYVRVETTFIQASHWFEQSVENWAITSPLSLPASFKVDKPAEFQKAVGTELSELLGQPRSEIFIENVGNAKHIRFWYIVVSSNKKMNESYNNVSKS

SEQ ID NO: 195 - protein, 1132 aa, Nitratifractor salsuginis
MKKILGVDLGITSFGYAILQETGKDLYRCLDNSVVMRNNPYDEKSGESSQSIRSTQKSMRRLIEKRKKRIRCVAQTMERYGILDYSETMKINDPKNNPIKNRWQLRAVDAWKRPLSPQELFAIFAHMAKHRGYKSIATEDLIYELELELGLNDPEKESEKKADERRQVYNALRHLEELRKKYGGETIAQTIHRAVEAGDLRSYRNHDDYEKMIRREDIEEEIEKVLLRQAELGALGLPEEQVSELIDELKACITDQEMPTIDESLFGKCTFYKDELAAPAYSYLYDLYRLYKKLADLNIDGYEVTQEDREKVIEWVEKKIAQGKNLKKITHKDLRKILGLAPEQKIFGVEDERIVKGKKEPRTFVPFFFLADIAKFKELFASIQKHPDALQIFRELAEILQRSKTPQEALDRLRALMAGKGIDTDDRELLELFKNKRSGTRELSHRYILEALPLFLEGYDEKEVQRILGFDDREDYSRYPKSLRHLHLREGNLFEKEENPINNHAVKSLASWALGLIADLSWRYGPFDEIILETTRDALPEKIRKEIDKAMREREKALDKIIGKYKKEFPSIDKRLARKIQLWERQKGLDLYSGKVINLSQLLDGSADIEHIVPQSLGGLSTDYNTIVTLKSVNAAKGNRLPGDWLAGNPDYRERIGMLSEKGLIDWKKRKNLLAQSLDEIYTENTHSKGIRATSYLEALVAQVLKRYYPFPDPELRKNGIGVRMIPGKVTSKTRSLLGIKSKSRETNFHHAEDALILSTLTRGWQNRLHRMLRDNYGKSEAELKELWKKYMPHIEGLTLADYIDEAFRRFMSKGEESLFYRDMFDTIRSISYWVDKKPLSASSHKETVYSSRHEVPTLRKNILEAFDSLNVIKDRHKLTTEEFMKRYDKEIRQKLWLHRIGNTNDESYRAVEERATQIAQILTRYQLMDAQNDKEIDEKFQQALKELITSPIEVTGKLLRKMRFVYDKLNAMQIDRGLVETDKNMLGIHISKGPNEKLIFRRMDVNNAHELQKERSGILCYLNEMLFIFNKKGLIHYGCLRSYLEKGQGSKYIALFNPRFPANPKAQPSKFTSDSKIKQVGIGSATGIIKAHLDLDGHVRSYEVFGTLPEGSIEWFKEESGYGRVEDDPHH

SEQ ID NO: 196 - protein, 1327 aa, Solobacterium moorei
MEGQMKNNGNNLQQGNYYLGLDVGTSSVGWAVTDTDYNVLKFRGKSMWGARLFDEASTAEERRTHRGNRRRLARRKYRLLLLEQLFEKEIRKIDDNFFVRLHESNLWADDKSKPSKFLLFNDTNFTDKDYLKKYPTIYHLRSDLIHNSTEHDIRLVFLALHHLIKYRGHFIYDNSANGDVKTLDEAVSDFEEYLNENDIEFNIENKKEFINVLSDKHLTKKEKKISLKKLYGDITDSENINISVLIEMLSGSSISLSNLFKDIEFDGKQNLSLDSDIEETLNDVVDILGDNIDLLIHAKEVYDIAVLTSSLGKHKYLCDAKVELFEKNKKDLMILKKYIKKNHPEDYKKIFSSPTEKKNYAAYSQTNSKNVCSQEEFCLFIKPYIRDMVKSENEDEVRIAKEVEDKSFLTKLKGTNNSVVPYQIHERELNQILKNIVAYLPFMNDEQEDISVVDKIKLIFKFKIPYYVGPLNTKSTRSWVYRSDEKIYPWNFSNVIDLDKTAHEFMNRLIGRCTYTNDPVLPMDSLLYSKYNVLNEINPIKVNGKAIPVEVKQAIYTDLFENSKKKVTRKSIYIYLLKNGYIEKEDIVSGIDIEIKSKLKSHHDFTQIVQENKCTPEEIERIIKGILVYSDDKSMLRRWLKNNIKGLSENDVKYLAKLNYKEWGRLSKTLLTDIYTINPEDGEACSILDIMWNTNATLMEILSNEKYQFKQNIENYKAENYDEKQNLHEELDDMYISPAARRSIWQALRIVDEIVDIKKSAPKKIFIEMAREKKSAMKKKRTESRKDTLLELYKSCKSQADGFYDEELFEKLSNESNSRLRRDQLYLYYTQMGRSMYTGKRIDFDKLINDKNTYDIDHIYPRSKIKDDSITNRVLVEKDINGEKTDIYPISEDIRQKMQPFWKILKEKGLINEEKYKRLTRNYELTDEELSSFVARQLVETQQSTKALATLLKKEYPSAKIVYSKAGNVSEFRNRKDKELPKFREINDLHHAKDAYLNIVVGNVYDTKFTEKFFNNIRNENYSLKRVFDFSVPGAWDAKGSTFNTIKKYMAKNNPIIAFAPYEVKGELFDQQIVPKGKGQFPIKQGKDIEKYGGYNKLSSAFLFAVEYKGKKARERSLETVYIKDVELYLQDPIKYCESVLGLKEPQIIKPKILMGSLFSINNKKLVVTGRSGKQYVCHHIYQLSINDEDSQYLKNIAKYLQEEPDGNIERQNILNITSVNNIKLFDVLCTKFNSNTYEIILNSLKNDVNEGREKFSELDILEQCNILLQLLKAFKCNRESSNLEKLNNKKQAGVIVIPHLFTKCSVFKVIHQSITGLFEKEMDLLK

SEQ ID NO: 197 - protein, 738 aa, Treponema phagedenis
MLQELFAKEIAKIDEGFFRRLDESAFYLEDKSLKQKYSLFNDDNFTDKDYYKKFPTIHHLIKALINDETHVDIRLLYLACHTIIKNRGHFLFEGKEFNTESRFDDAINELFSYLRQDMEIDFAFEDKIADIKEILENKKIGMRDKQNALNKKLSIAPKDKQKKEIIKLIVGASFNLKTLFNDEKYSSEKESYSFAKSNYEEKEAVLESLLGDGFGLILRAKAVYDSSVLSEILGNETYLSFAKVKIYDKHKEDLAKLKKVIKTYHADEFKKVFAEANIQGNYCSYVGSCKKNGKKVPIEKRADKDAFYDFLKKILKDEKAKNSDADYAFILNEIELKTFLPKQVSKKNANIPYQLRRMELEKIVNNAEKYFSFLSEKDEYGTVKEKIIQLLTFKRPYYIGIIQDTHKEKFPDRCWVVKKENAKNEKITPWNFYDHIDEDKTAEAFITSRTNKCTYLIGEDVLPRNSLLYMEYTVLNELNNLKVSVDGVNIFDVKLKKKIYEQVFKQRKEVSKKTIADFLKKEGICKKENDVVITGIDEKCTTSLKLYIDIKKIIGKRIEEEPTKNALEDIILWASIYDEGEGRKILEAKIQSVYPDVFTQDELNKILKLKISGWGRFSRKFLESIVASFPGFTDTINIITAMRETNFNLMELLGDAYGFSKGIEKFNSKFNDDKKVFSYDKLVKDLYLSPSVKRMLWRALVIVKEVKSIMGKDPKKYLLKWQEEKKLKREGLPPAMQV

SEQ ID NO: 198 - protein, 1377 aa, Streptococcus equinus
MEKTYSIGLDIGTNSVGWAVITDDYKVPAKKMKVLGNTDKKYIKKNLLGALLFDSGETAEATRLKRAARRRYTRRKNRLRYLQEIFAKEMAKVDESFFQRLEESFLTDDDKTFDSHPIFGNKAEEDTYHQEFPTIYHLRKHLADSPEKVDLRLVYLALAHMIKFRGHFLIEGQLNAENTDVQKIFADFVGVYDRTFDDSHLSEITVDAASILTEKISKSRRLENLIKQYPTEKKNTLFGNLVALALGLQPNFKTNFKLSEDAKLQFSKDTYDEDLEELLGKIGDDYADLFTAAKNLYDAILLSGILTVDDNSTKAPLSASMIKRYEEHHEDLEKLKTFIKVNNFDKYHEIFKDKSKNGYAGYIENGVKQDIFYKHLKSIISEKNGGQYFLDKIEREDFLRKQRTFDNGSIPYQIHLQEMRTILRRQGEYYPFLKENQAKIEKILTFRIPYYVGPLARKNSRFAWAKYHSDEPITPWNFDEVVDKEKSAEKFITRMTLNDLYLPEEKVLPKHSYVYETFAVYNELTKIKYVNEQGKSFFFDANMKQEIFDHVFKENRKVTKAKLLSYLNNEFEEFRINDLIGLDKDSKSFNASLGTYHDLKKILDKSFLDDKTNEQIIEDIVLTLTLFEDRDMIHERLQKYSDIFTSQQLKKLERRHYTGWGRLSYKLINGIRNKENNKTILDFLIDDGDANRNFMQLINDDSLSFKTTIQEAQVVGDVDDIEAVVHDLPGSPAIKKGILQSVKIVDELVKVMGHNPQNIVIEMARENQITGYGRNRSNQRLKRLQDSLKEFGSDILSKKKPSYVDSKVENSHLQNDRLFLYYIQNGKDMYTGEELDIDHLSDYDIDHIIPQAFIKDNSIDNRVLTSSAKNRGKSDDVPSIEIVRNRKSYWYKLYKSGLISKRKFDNLTKAERGGLTETDKAGFIKRQLVETRQITKHVAQILDARFNTKCDENDKVIRDVKVITLKSSLVSQFRKEFKFYKVREINDYHHAHDAYLNAVVGTALLKKYPKLAPEFVYGEYKKYDVRKLVAKSSDNHSELGKATAKYFFYSNLMNFFKTEVKYADGRVFERPDIETNADGEVVWNKQRDFNIVRKVLSYPQVNIVKKVEVQTGGFSKESILPKGDSDKLIPRKTKKLQWETQKYGGFDSPTVAYSVLVVADVEKGKTRKLKTVKELVGISIMERSSFEENPVSFLEKKGYHNVQEDKLIKLPKYSLFEFEGGRRRLLASATELQKGNEVVLPQYMVNLLYHSQHVNNSHKPEHLNYVKQHKDEFKDIFNLIISIARINILKPKVVDNLINEFTEYGQEDISSLSESFINLLKFISFGAPGAFKFLKLDVKQSNLRYKSTTEALSATLIHQSVTGLYETRIDLSKLGEE

SEQ ID NO: 199 - protein, 1128 aa, Streptococcus vestibularis
MSDLVLGLDIGIGSVGVGILNKVTGEIIHKNSRIFPAAQAENNVERRTNRQGRRLTRRKKHRRVRLNHLFEESGLITDFTKVSINLNPYQLRVKGLIDELSNEELFIALKNMVKHRGISYLDDASDDGNSSVGDYAQIVKENSKQLETKTPGQIQLERYQKYGQLRGDFTVEEDGKKHRLINVFPTSAYRSEALRILQTQKEFNPQITDEFINRYLEILTGKRKYYHGPGNEKSRTDYGRYTTKKDSENEYITLDNIFGILIGKCTFYPEEYRAAKASYTAQEFNLLNDLNNLTVPTETKKLSEEQKNQIINYVKNEKAMGPAKLFKYIAKLLSCDVADIKGYRIDKSDKAEIHTFEAYRKMKTLETIDFEKMSRDQLDKLAYVLTLNTEREGIQEALDHEFADGNFSQEQIDELVQFRKANSSIFGKGWHNFSVKLMMELIPELYATSEEQMTILTRLGKQKTTSSSNKTKYIDEKLLTEEIYNPVVAKSVRQAIKIVNAAIKEYGDFDNIVIEMARETNEDDEKKAIQKIQKANKDEKDAAMLKAANQYNGRAELPHSVFHGHKQLATKIRLWHQQGERCLYTGKTISIHDLINNPNQFEIDHILPLSITFDDSLANKVLVYATANQEKGQRTPYQALDSMDDAWSFRELKAFVRESKSLSNKKKEYLLTEEDISRFDVRKKFIERNLVDTRYASRVVLNALQEHFRAHKTDTKVSVVRGQFTSQLRRHWGIEKTRDTYHHHAVDALIIAASSQLNLWKKQKNTLVNYSENQLLDIETGELISDDEYKESVFKAPYQHFVDTLKSKEFEDSILFSYQVDSKFNRKISDATIYATRQAKVGKDKKDETYVLGKIKDIYSQTGYDAFIKIYQKDKSKFLMYRHDPQTFEKVIEPILENYPNKEMNEKGKEVPCNPFLKYKEEHGDYIRKYSKKGNGPEIKSLKYYDSKLGNHIDITPKDSNNKVVLQSVSPWRADVYFNKTTGKYEILGLKYADLQFEKGTGTYKISQEKYNVIKKKEGVDSDSEFKFTLYKNDLLLIKDTETKEQQLFRFLSRTKPNVKHYVELKPYDKQKFEGNESLINVLGAVAKGGQCQKGINKPNISIYKVRTDVLGNQHIIKNEGDKPKLDF

SEQ ID NO: 200 - protein, 1080 aa, Methylocystis sp.
MRVLGLDGGIASIGWALIEIFEDHEPSDGRIIDTGAWMFDAPEEKSQTGTKLKSELRRIFRGQRRVIRRRRQRMNEVRRILHRHGLLSSDNRDALKQPGLDPWKIRAEGIDRLLSPIEFAVALGHIARHRGFKSNSKGAKTSDLDAESSRMKKAVGETREKLARFGSPAKLLVEDEGFVLRQTKLKSGALETVRRFRNRDGDYSRSLLRDDLAAEVRALFRAQARLQSTFAKVELEAEFTQAAFFQRPLQDSERLVGPCPFEPAEKRSPKRGYSFELFRFLSRLNHLTLREGSEERTLTVEELRTAAADFGGVAKFTFSTLRKRLALPDIAIFVGIKADDEKKLDVVARSGEAATGTARLRRVVIDALGELAWGALISAPERLDKITEIITFRSDLDRIRAGLIEAGFDTPLIEAIVRAAADGKLDAFTGVGHISAKAARNIIPGLMRGMTYDKACAAAGYDHTASRERDAFDVGMHGKEALKKILQEERISRELVGSPSARKALIEAVKQVKAIIEKYGVPDRIHVELARDVGKSIEERRDIHFGIEKRSRQKDKLRELFGKEVGHLPQDGERGKEELLRFELWNEQMGRCLYTDEYINPKQLVASDNSVQVDHILPWSRFGDDSYLNKTLCTAKANQDKKGRTPYEWFRADKPEAEWDAFVARVESIQFMKGLKKRNYKLKNAEEAAEKFRSRNLNDTRWTCRLLAEALKQLYPKGEKDKDGKERRRVFTRPGALTNRLRRAWSLQRRKKSEKGERIADDRHHALDAIIVAATTESLLIRATREVQDIERKGLHYDLTKNITQPWPGFADEALDAVEKVFVARAERRRARGKAHDATIRHIAVRDDEAKVYERKKVGDIKLGDLIRVKDAERNAPLIENLRKWIEAGSPRDNPPLSPKGDPVSKVRLVTKNKVNITLDTGNPERLATVDRGEMARVDVFRKANRKGKYEYYLVPIYPHEIATMETPPMRAVQGGGDDDKWPEIDSTFEFLWSINQLSLLELTKPDGEVIRSYFRSLDRNTGALTVSGIANSTATRKGIGTRTLIDFKKLHVDRLGQIFEVERELRTWRGETWRGKDCI

SEQ ID NO: 201 - protein, 1087 aa, Phascolarctobacterium succinatutens
MLRMKYAIGLDIGIASVGYAVLALDHEENPWGIIRLGSRIFDVAENPKDGASLALPRREARSVRRRLRRHHHRLERIKNLLINTEFITKDELLHLYDGNLSDVYELRVKALDYSVTNAELTRILLHLAQRRGFKSNRKSDANDKEAGQLLEAVSANAKRMQENHYRTVGEMFYKDDLFSKYKRNKGGTYLTTVHRDMIAAEARTILEKQFALGNNICTQDFIDKYLSILLSQRQFDEGPGEPSPYAGNQIANMIGKCTFEPNEYRAAKASYSFERFNLLQKVNHLRLLLEGKSIALDNEQRKKIIALAHDKADLRYSHIRKALGLDEKVLFNTITYNDDVSVIEKKTKFNFLQAYHQIKKVLAEDMQKLTTEQLDNIGQILSTYKSDNKRTEELSALGLEKKIIDALLGINGLSKFAHLSLKALRKINPYLEEGKIYNEACTAAGYDFKAHANTQKTELLPAYKEEMDDITSPVARRAIAQSIKVINAIIREQKGSPLYINIELAREMAKGFDERTQIDKANKENQAKNERIMERIRTEFHKANPTGMDLIKLKLWEEQDGRSPYSQKAISINRLFEPGYVDIDHIVPYSISFDDSFKNKVLVFSDENRDKGNRLPIAYLQSKFGAKAAENFMIWVQSNIKDYKKRQKLLKREITEEDINKFKERNLQDTKTISRFLYNYINDYLLFAPSDTGKKKRVTAVNGTITAYLRKRWGINKIRANGDKHHAVDAVVIACTTDKMIKDLSSFSRYHELEYTHTDTESFLVNSLTGEILKRFPYPWEDFRPELMARLSDNPADALRKLNLIFYHGIDLSTIKPIFVSRMPRHKVTGAAHKATIKSARCLDNGIVICKTSLQNLKLDKEGEIANYYAPESDTILYNALKERLRSYDNKPAKAFAEPFYKPKADGTPGPLVKKVKVYEKSTLNVAVQQNTAVADNDSMVRVDVFHVKGNGYYLVPIYIADTLKKELPNKAIVAYKPYADWPVMDDSNFIFSLYPNDLIKFEHKNSVKFAKVNKESTLNDFYSTKSEIVYFKGCNINTGAITIINHENTYVVSSLGVKTLPSLEKYQADVLGNYTKVKKEVRKPFR

SEQ ID NO: 202 - protein, 1375 aa, Lactobacillus ruminis
MRKNQEPYNIGLDIGTSSIGWSIMNDNFDLMRVKGKKGIGVRLYNEGQSAAERRMHRTARRRYGRRKWRLRLLEDFFDEHMAEVDDTFFARLKDSNISPKDDKKYRKSLLFPKSKGVTYQDDGEFYKKYPTMYHLRYALMTEHRKFDLREIYLAFHHMVKYRGNFLYDTSVDSFEAKNLDIKGKFDEINDLLSSYTDFYVDNSNAALVESILLEKNTTRKDKSKKIAKLLHVEDKEKGKNKKAKDLATQISNAVLGLKCNFHLIFELQQKYSFDLCSEKTEENIAKLSEVLDENQKMLLMILKEVQDQVMLNAFVPSGMSLSEAMMQKYDDYGEQLKIYHELEHSVSDDSAAKLRGAYRDYNDNIIKRIDGDNKKDTFYKRVKNILTKISKEYVDQDVLESCGKLKKLIDENKLFIRQRTAANGVLPHQLHQIEMRKIIDNQKEYYPWLAEPNPNEKRRVYSKYKVEELIAFRIPYYVGPLVDPNNADKNKEARFSWMVRKKDGEITPWNFYDKVDWAESANNFIERMKSKDTYLLGEDVVPKESMLYQKYEVLNELNNLRINDSGLSDSFEDVKLKQAIYNDLFKKQKIVKITDLQNYLVQNHKYLVKPKISGLADENRFLSSLSTYSDLKTIFGDKVDDRTYFNDFEKMVEYSTVFEDGHDYNQKLDEYTWLTKEEKYKIGKKRYRGWGKLSKKLLTGLRDKNNHTIMDNLWETNRNFMQIQTADEFSKQIAEENERHLKGSVSDAINDMYTSPANKKAIRQVLRVVDDIQKAMGYAPSSISLEFAREDGPSVRTVSRANRMKSIYEKYASEVSEEVMKDLDGVIKDKKGLNDRLYLYFEQQGKDMYSGHPLDFDKVISGQEYDIDHILPQAVIKDDSLDNRVLTTKALNNDVKSKGVPCRMFNGMHSFWKNLYDKGFISRRKFNNLTTNPENIDKYKMKGFVNRQLVETRQIIKLVANVLNDKYQNDDVDIIEVRAELTHDVRKHFKFYKNRNVNDYHHAFDAYLTSFIGHYLFKKYPNLRPLFDYNDFMKVSDNVFKQLRGNNFLGEFLNKTGDIISTDGNFVLNKEEMINKLNKAYAFKKILVTKEVGQRTGAMFNETRYPAPNSRKAALKYRRMPKPDSLISVKDYKNTDIYGGYSGKNDAYMVIVDMGKQYMVVGVPVRYTEKLDKLRIKHSELYRDELRKVLSRDKTLLDSKGNVKRFDIVLDRVLYGQLIEDGNELFTLGSSKYKRNFRQLFLDKQCIEILDSSATPQPTDEELIWVYDQILDKVDKYFELYDINRQRETLRKGRAAFCSLPNISMKKDDVTKKKILNEILVALHANESESNCEKIGKKVFGRLQVPGGIKLSKEAKLIYQSPTGLFERVVYLKDL

SEQ ID NO: 203 - protein, 1391 aa, Prevotella oralis
MKKILGLDLGTTSIGWALVNEKENNEELSSIIRLGVRVNPLTVDEKSNFEKGKDITTNADRTKCRSARRNLQRFKLRREALADCLKRHGLMTDETPLCETNNSIIFKTYSNRAKAVCEKIALDDFVRVLFMINKKRGYKSSRKLNTDDEGTLVDGMDVAKLLYNEQITPGEYLLRLFKKGKKTRPDFYLSDLKAELERIWDFQRTFYPEILCNALKEDLKGKSRTQSSAIFYAKYKVSTAKIAGKDKRLQELTWRTDALRKQLTIDEVAYVICSINGEVNGSSQRLSMISDRSKLLYFNHQTIGQYLMQRLEENPNAGLKNIIFYRQDYEDEFNDIWNSQATYHKELTPELKKEVKDIIFYQRGLKSCKWLINYCELEHEEIEVKTPEGKLRKITIGSKTCPKSSPLFQEFKIWQVLNNLQVSPLNSRRKAKRKKDEEPSLFSDEDMNTACRYLNEEEKLTLFKELSIKKELKKKDALKLLFENYKELDLNYKVISGNVTMANLYRAFQDIISLTGNGEFDFQAMPAEEAEKTVEEIFGGLGYKTAFLHFDASLHDKEFERQPAYRLWHLLYSYAGDQSKTGIEALVKRIQELCGFEPEYARILANISFIPDYGNLSSKAMRKILPYMQDGYEYSEACSKAGYRHSASSLTKEEINKKNYKTHLDEIKRNSLRNPIVEKILNQMVNVVNSVIDTYSNIDEIRIEMARELKKSKPEREDMSFAISKATKETERIKGILEQEFKIQHVTRNDIIRYRLYEELKPNGYKTLYSNTYIPREDLFSKKFDIEHIIPKARLFDDSYSNKTLELRDINIEKGNQTAYDFVLSKYGEEGLYKYEQRVEEFKKNNEQAGTKCRKLLMREADIPSDFLNRDLNDSQYIAKKAHELLREIVPTVTATTGSITNRLREDWKLVNVMKELNWEKYDKLGLTEEYKDKDGNTVRHIKDWTKRNDHRHHAMDALTIAFTKPSFIQYLNNLNARSNRGGSIYGIEQKELERENNKLVFIPPIDPKIFRKQAKEHLSNILISIKAKNKVVTKNVNKTKSKSGTNRKVQLTPRGQLHLETVYGKIRTYKTEEIKVGTKLTEELIAKVADKKIREALMQRLSEYGGNIKKAFQNISKHPIWLNGSHTKHVPEKVKIVFFEDVFTIRKAITPDIKIDKVIDSKIRRILQERLNEFGGEASKAFSNLDENPIWFNRDKGIAIKSVKIRGIAKGTAIRVKKDIHGKTIIGNNGYPVANDYVNTGNNHHVAIFRDKDGNLQEHIVSFYEATARAIQNLPIVDRNYNSEKDWKFLFSMKQNEYFVFPNPNTGFNPSEISLKDEKNYALISPNLFRVQKLSHYYYVFRHHLETNVDTNLQLKDITWKRITAVNNLTGAVKVRIDHLGRIVDVGEYK

SEQ ID NO: 204 - protein, 1167 aa, Streptococcus sanguinis
MLFGLKTKFKDCFELEEEPDLNFSKENYDDNLEKLLGELGEDFSDVFDKLKILRDTILLSGMLTYTGATHARFSATMVERYEEHRKDLQRFKSFIKQNLSEQDYLDIFGRKTQNGFDVDKETKGYVGYITNKMVLTNPQKQKTIQQNFYDYISGKITGIEGSEYFLNKISDRTFLRKLRTSDNGAIPNQIHAYELEKIIERQGKDYPFLLENKDKLLSILTFKIPYYVGPLAKGNNSRFAWIKRANSSDILDDNDEDTRNGKIRPWNYHKLINMDETRDAFITNLIGNDTILLNEKVLPKRSLIYEEVMLQNELTRVKYKDKYGKAHFFDSEHRQNIINGLFKINSKRVNAERLIKYLSDNHKDLNAIEIVSGVEKGKSFNSTLKTYNDFKTIFSEEFLDSEIYQKELEEIIKVITVFDDKKSIKNYLTKYFGHLEFLDEEKINQLSKLRYTGWGRYSAKLLLDIRDEDTGFNLLQFLRNDEENRNLTNLISDNTLSFDPKIKAIQSKSTVEDDVFDEIKKLAGSPAIKRGILNSIKIVDELVQIIGYPPQNIVIEMARENMTTEEGQKKTKTRKSKLESALKNIENSVLENGKVLHSDEQLQSEKLYLYYLQNGKDIYSLDETGSPAPIYLDQLDQYEVDHIIPYSFLPIDSIDNKVLTHRKNNQRKLDNIPDKETVAHMKPFWEALYNAKLISQTKYQRLTTSERTPDGVLTESMKAGFIERQLVETRQIIKHVARILDNRFSDTKIITLKSQLVTNFRNTFHIAKIRELNDYHHAHDAYLAVVVGQTLLKAYPKLAPELIYGHHVHFNRHEENKATLRKHLYSNIMRFFNNPDSKVSKDIWDCNRDLPIIKHVIYNSQINFVKRTMIKKGAFYNQNPVGKFNKQLAANNRYPLKTKALCLDTSIYGGYGPMNSTLSIIIIAERFNEKKGKIETVKEFHDIFIIDYEKFNNNPFQFLNDTSENGFLKKNNINRVLGFYRIPKYSLMQKIDGTRMLFESKLNLHKATQFKLTKTQNELFFHMKRLLTNSNLMDLKSESAIKESQNFILKHKEEFDNISNQLSAFSQKMLGNTTSLKNLIKGYNERKIKEIDIREETIKYFYDNFIKMFSFVKSGAPKDINDFFDNKYTVARMRPKPDKRLLNATLIHQSITGLYETRIDLSKLGED

SEQ ID NO: 205 - protein, 1334 aa, Staphylococcus pseudintermedius
MGRKPYILSLDIGTGSVGYACMDKGFNVLKYHDKDALGVYLFDGALTAQERRQFRTSRRRKNRRIKRLGLLQELLAPLVQNPNFYQFQRQFAWKNDNMDFKNKSLSEVLSFLGYESKKYPTIYHLQEALLLKDEKFDPELIYMALYHLVKYRGHFLFDHLKIENLTNNDNMHDFVELIETYENLNNIKLNLDYEKTKVIYEILKDNEMTKNDRAKRVKNMEKKLEQFSIMLLGLKFNEGKLFNHADNAEELKGANQSHTFADNYEENLTPFLTVEQSEFIERANKIYLSLTLQDILKGKKSMAMSKVAAYDKFRNELKQVKDIVYKADSTRTQFKKIFVSSKKSLKQYDATPNDQTFSSLCLFDQYLIRPKKQYSLLIKELKKIIPQDSELYFEAENDTLLKVLNTTDNASIPMQINLYEAETILRNQQKYHAEITDEMIEKVLSLIQFRIPYYVGPLVNDHTASKFGWMERKSNESIKPWNFDEVVDRSKSATQFIRRMTNKCSYLINEDVLPKNSLLYQEMEVLNELNATQIRLQTDPKNRKYRMMPQIKLFAVEHIFKKYKTVSHSKFLEIMLNSNHRENFMNHGEKLSIFGTQDDKKFASKLSSYQDMTKIFGDIEGKRAQIEEIIQWITIFEDKKILVQKLKECYPELTSKQINQLKKLNYSGWGRLSEKLLTHAYQGHSIIELLRHSDENFMEILTNDVYGFQNFIKEENQVQSNKIQHQDIANLTTSPALKKGIWSTIKLVRELTSIFGEPEKIIMEFATEDQQKGKKQKSRKQLWDDNIKKNKLKSVDEYKYIIDVANKLNNEQLQQEKLWLYLSQNGKCMYSGQSIDLDALLSPNATKHYEVDHIFPRSFIKDDSIDNKVLVIKKMNQTKGDQVPLQFIQQPYERIAYWKSLNKAGLISDSKLHKLMKPEFTAMDKEGFIQRQLVETRQISVHVRDFLKEEYPNTKVIPMKAKMVSEFRKKFDIPKIRQMNDAHHAIDAYLNGVVYHGAQLAYPNVDLFDFNFKWEKVREKWKALGEFNTKQKSRELFFFKKLEKMEVSQGERLISKIKLDMNHFKINYSRKLANIPQQFYNQTAVSPKTAELKYESNKSNEVVYKGLTPYQTYVVAIKSVNKKGKEKMEYQMIDHYVFDFYKFQNGNEKELALYLAQRENKDEVLDAQIVYSLNKGDLLYINNHPCYFVSRKEVINAKQFELTVEQQLSLYNVMNNKETNVEKLLIEYDFIAEKVINEYHHYLNSKLKEKRVRTFFSESNQTHEDFIKALDELFKVVTASATRSDKIGSRKNSMTHRAFLGKGKDVKIAYTSISGLKTTKPKSLFKLAESRNEL

SEQ ID NO: 206 - protein, 1156 aa, Ruminococcus albus
MGNYYLGLDVGIGSIGWAVINIEKKRIEDFNVRIFKSGEIQEKNRNSRASQQCRRSRGLRRLYRRKSHRKLRLKNYLSIIGLTTSEKIDYYYETADNNVIQLRNKGLSEKLTPEEIAACLIHICNNRGYKDFYEVNVEDIEDPDERNEYKEEHDSIVLISNLMNEGGYCTPAEMICNCREFDEPNSVYRKFHNSAASKNHYLITRHMLVKEVDLILENQSKYYGILDDKTIAKIKDIIFAQRDFEIGPGKNERFRRFTGYLDSIGKCQFFKDQERGSRFTVIADIYAFVNVLSQYTYTNNRGESVFDTSFANDLINSALKNGSMDKRELKAIAKSYHIDISDKNSDTSLTKCFKYIKVVKPLFEKYGYDWDKLIENYTDTDNNVLNRIGIVLSQAQTPKRRREKLKALNIGLDDGLINELTKLKLSGTANVSYKYMQGSIEAFCEGDLYGKYQAKFNKEIPDIDENAKPQKLPPFKNEDDCEFFKNPVVFRSINETRKLINAIIDKYGYPAAVNIETADELNKTFEDRAIDTKRNNDNQKENDRIVKEIIECIKCDEVHARHLIEKYKLWEAQEGKCLYSGETITKEDMLRDKDKLFEVDHIVPYSLILDNTINNKALVYAEENQKKGQRTPLMYMNEAQAADYRVRVNTMFKSKKCSKKKYQYLMLPDLNDQELLGGWRSRNLNDTRYICKYLVNYLRKNLRFDRSYESSDEDDLKIRDHYRVFPVKSRFTSMFRRWWLNEKTWGRYDKAELKKLTYLDHAADAIIIANCRPEYVVLAGEKLKLNKMYHQAGKRITPEYEQSKKACIDNLYKLFRMDRRTAEKLLSGHGRLTPIIPNLSEEVDKRLWDKNIYEQFWKDDKDKKSCEELYRENVASLYKGDPKFASSLSMPVISLKPDHKYRGTITGEEAIRVKEIDGKLIKLKRKSISEITAESINSIYTDDKILIDSLKTIFEQADYKDVGDYLKKTNQHFFTTSSGKRVNKVTVIEKVPSRWLRKEIDDNNFSLLNDSSYYCIELYKDSKGDNNLQGIAMSDIVHDRKTKKLYLKPDFNYPDDYYTHVMYIFPGDYLRIKSTSKKSGEQLKFEGYFISVKNVNENSFRFISDNKPCAKDKRVSITKKDIVIKLAVDLMGKVQGENNGKGISCGEPLSLLKEKN

SEQ ID NO: 207 - protein, 1440 aa, Weeksella virosa
MKTILGLDLGTNSIGWALVEQDFENKQGLILGMGSRIIPMDAGIIGKFAEGSSISQTAERTGYRSIRRLRERHLLRRERLHRVLNILKFLPEHYAAEIDFEKRFGQFLAETEPKLAWKKNAEGKFEFLFQRSFDEMVADFKANGQDIKIPYDWTIYYLRKKALTQKISPQELAWIILNFNQKRGYYQLRGEEEEENPNKKVEFYSLKIVDVVADEQPNKKGDTWYSLHLENGWVYRRSSKIPLYDWKDKVRDFIVTTDINEDGSEKLDKDGEVKRSFRAPKEDDWTLIKKKTEQEIEQFNQTVGSYIYEALLDNPTQKIRGKLVRTIERKFYKSELKKILEKQIELQPELFTEDLYNACARELYRRNVAHQQQLSSRDFVYLFLNDIIFYQRPLRSQKSLISNCSLEFRTIKDKDGNGQIIYLKAIPKSNPYYQEFRVWQWLYNLKIFTKEDDKDVTNQFINKVEDLEALFEFLMNQKEVNHTDILTYLIEPIVKSKYPNAKGKAFKDELKKELKKYRWNYVYDADKDESKSYPMNETRYELRKRLDKVENVPADFMTRKIEQHLWHIIYSVTDKIEFEKALKSFANKYDLHQESFVENFKRFKPFDSDYGTYSEKAIKKLLPLMRVGKYWSWDIIDDKTKTRIGKIITGEYDETIKNRVREKAIDLTEENHFQGLQLWLAQYIVYDRHSEADIAGKWNSVADLEQYLSEFKQHSLRNPIVEQVITETLRVVRDIWKQYGKGAKDYFDEIHIELGREMKNTAEERKRLSSIISENETTNLRIRAILEELMYDENMENVRPYSPMQQEALKIYEDGVLSSSVEIPEDIEKISKKSEPTKSEIQRYKLWLEQKYRSPYTGRPIPLSKLFTPAYQIEHIIPQARFFDDGFSNKVICESEVNALKDKMLGLEFIQNYYGQKVTTSFGEVTILTEDAYKAFVKEHYDKNRSKRNKLLLEEIPEKMIDRQMNDTRYISKYISKVLSNLVRGEKDDEGVNSKNIIPGNGKITGILKQDWGLNDVWNDLILPRFERMNQLTNSTDFTAWNEKHQKFLPSVPLELSKGFQKKRIDHRHHALDALIIACATRDHVNLLNNKHAKSRNERYDLQHKLRHTTPWQDKEGKVRTKFTEFKKPWETFTQDTKKELEKIVVNFKQNLRVINKATNYYEKIVDGKKVMFKQEGVNWAIRKPMHKETVSGKIDLPRVKVSKGKILTATRKSLDTSFNAKTILSITDTGIQKILLNYLKAKGNPELAFSPEGIEEMNQNISLYNDGKPHQPILKVRVFEQGSKFPLGETGNKTTKYVEAAKGTNLFFGVYEDNQGKRSYDTIPLNIVIERQKQGLNSVPETNEKGHRLLFSLSPNDLVYVPIEGEVFDETNPDVNRIYKVVSFSGSQMFCVRQDVATSIVYKLEFSSLNKMERTIDGIMIKEICIKLKVDRLGNISKA

SEQ ID NO: 208 - protein, 1179 aa, Sphaerochaeta globus
MSKKVSRRYEEQAQEICQRLGSRPYSIGLDLGVGSIGVAVAAYDPIKKQPSDLVFVSSRIFIPSTGAAERRQKRGQRNSLRHRANRLKFLWKLLAERNLMLSYSEQDVPDPARLRFEDAVVRANPYELRLKGLNEQLTLSELGYALYHIANHRGSSSVRTFLDEEKSSDDKKLEEQQAMTEQLAKEKGISTFIEVLTAFNTNGLIGYRNSESVKSKGVPVPTRDIISNEIDVLLQTQKQFYQEILSDEYCDRIVSAILFENEKIVPEAGCCPYFPDEKKLPRCHFLNEERRLWEAINNARIKMPMQEGAAKRYQSASFSDEQRHILFHIARSGTDITPKLVQKEFPALKTSIIVLQGKEKAIQKIAGFRFRRLEEKSFWKRLSEEQKDDFFSAWTNTPDDKRLSKYLMKHLLLTENEVVDALKTVSLIGDYGPIGKTATQLLMKHLEDGLTYTEALERGMETGEFQELSVWEQQSLLPYYGQILTGSTQALMGKYWHSAFKEKRDSEGFFKPNTNSDEEKYGRIANPVVHQTLNELRKLMNELITILGAKPQEITVELARELKVGAEKREDIIKQQTKQEKEAVLAYSKYCEPNNLDKRYIERFRLLEDQAFVCPYCLEHISVADIAAGRADVDHIFPRDDTADNSYGNKVVAHRQCNDIKGKRTPYAAFSNTSAWGPIMHYLDETPGMWRKRRKFETNEEEYAKYLQSKGFVSRFESDNSYIAKAAKEYLRCLFNPNNVTAVGSLKGMETSILRKAWNLQGIDDLLGSRHWSKDADTSPTMRKNRDDNRHHGLDAIVALYCSRSLVQMINTMSEQGKRAVEIEAMIPIPGYASEPNLSFEAQRELFRKKILEFMDLHAFVSMKTDNDANGALLKDTVYSILGADTQGEDLVFVVKKKIKDIGVKIGDYEEVASAIRGRITDKQPKWYPMEMKDKIEQLQSKNEAALQKYKESLVQAAAVLEESNRKLIESGKKPIQLSEKTISKKALELVGGYYYLISNNKRTKTFVVKEPSNEVKGFAFDTGSNLCLDFYHDAQGKLCGEIIRKIQAMNPSYKPAYMKQGYSLYVRLYQGDVCELRASDLTEAESNLAKTTHVRLPNAKPGRTFVIIITFTEMGSGYQIYFSNLAKSKKGQDTSFTLTTIKNYDVRKVQLSSAGLVRYVSPLLVDKIEKDEVALCGE

SEQ ID NO: 209 - protein, 1370 aa, Streptococcus gallolyticus
MTKKNYSIGLDIGTNSVGWAVITDDYKVPAKKMKVLGNTDKKYIKKNLLGALLFDSGETAEATRLKRTARRRYTRRKNRLRYLQEIFAEEMTKVDESFFYRLDESFLTTDEKDFERHPIFGNKAEEDAYHQKFPTIYHLRNYLADSSEKADLRLVYLALAHMIKYRGHFLIEGKLNAENTDVQKLFTDFVGVYDRTFDDSHLSEITVDVASTLTEKISKSRRLENLIKYYPTEKKNTLFGNLIALALGLQPNFKMNFKLSEDAKLQFSKDTYEEDLEELLGKIGDDYADLFTSAKNLYDAILLSGILTVDDNSTKAPLSASMIKRYVEHHEDLEKLKEFIKANKSELYHDIFKDKNKNGYAGYIENGVKQDEFYKYLKNTLSKIDGSDYFLDKIEREDFLRKQRTFDNGSIPHQIHLQEMHAILRRQGDYYPFLKEKQDRIEKILTFRIPYYVGPLVRKDSRFAWAEYRSDEKITPWNFDKVIDKEKSAEKFITRMTLNDLYLPEEKVLPKHSHVYETYAVYNELTKIKYVNEQGKESFFDSNMKQEIFDHVFKENRKVTKEKLLNYLNKEFPEYRIKDLIGLDKENKSFNASLGTYHDLKKILDKAFLDDKVNEEVIEDIIKTLTLFEDKDMIHERLQKYSDIFTANQLKKLERRHYTGWGRLSYKLINGIRNKENNKTILDYLIDDGSANRNFMQLINDDTLPFKQIIQKSQVVGDVDDIEAVVHDLPGSPAIKKGILQSVKIVDELVKVMGDNPDNIVIEMARENQTTNRGRSQSQQRLKKLQSSLKELGSNILNEEKPSYIEDKVENSHLQNDQLFLYYIQNGKDMYTGDELDIDHLSDYDIDHIIPQAFIKDDSIDNRVLTSSAKNRGKSDDVPSLDIVRARKAEWVRLYKSGLISKRKFDNLTKAERGGLTEADKAGFIKRQLVETRQITKHVAQILDARFNTEHDENDKVIRDVKVITLKSNLVSQFRKDFEFYKVREINDYHHAHDAYLNAVVGTALLKKYPKLASEFVYGEYKKYDIRKFITNSSDKATAKYFFYSNLMNFFKTKVKYADGTVFERPIIETNADGEIAWNKQIDFEKVRKVLSYPQVNIVKKVETQTGGFSKESILPKGDSDKLIPRKTKKVYWDTKKYGGFDSPTVAYSVFVVADVEKGKAKKLKTVKELVGISIMERSFFEENPVEFLENKGYHNIREDKLIKLPKYSLFEFEGGRRRLLASASELQKGNEMVLPGYLVELLYHAHRADNFNSTEYLNYVSEHKKEFEKVLSCVEDFANLYVDVEKNLSKIRAVADSMDNFSIEEISNSFINLLTLTALGAPADFNFLGEKIPRKRYTSTKECLTATLIHQSITGLYETRIDLSKLGEE

SEQ ID NO: 210 - protein, 1044 aa, Nitrosomonas sp.
MLHKMRYRLALDLGSTSLGWAMVRLNANQQPCAVIKAGVRIFSNGRNPKDGSSLAVTRREARSMRRRRDRLLKRKARMMRTLIEYGFFPANETQRKALENLNPYALRAKGLDEALTPSEFARALFHINQRRGFKSNRKTDKKDSDSGALKTAIKQLHSVLDPQGNDGKPRTVGELLYKRFTDLSKLPKDRTVRARYRQDKIVKDDGKTKIDKYYDLYIDRAMIEQEFDALWKKQSELNPILFTENARADLKDVLLYQRSLKPVKPGRCTFMSEEERAPLALPSTQRFRMYQEVNNLRILREGLKEESLTLQQRDDLINALEKNNRRTFTQIKKLLGVGGSVQFNFEDPKREELKGNTTSAILGKSEHFGEAWFAFNEAKQDAIVLQLIKEENEAKLVRWLQDETGIDEKRAEVIANAGLPEGYGSLCIEALARILPELRRDVVTYDKAVQAAGFEHHSKLNRNEEIPDITFKIESIDRNSGEIKQFHLHKELPYYGEYLQRHVGFGSGKPEDSIEKRYGKIANPTVHIGLNQVRVVVNALIKRYGHPSEIIVEVARDLKQSKDRRDEENKRQAENQKRNERLRKDIADILGISEERVRRDDIEKMILWEELSFDPADRRCPYSGVQVSTVMLLSDEVEVEHILPFSQTLDDSLNNKTVALRQANRIKGNRTPWEAFGTSNISGFDYSGILTRAELMPKAKRYRFAEDGYQRWLKDDAGFLARALNDTRHLSKIAREYMSLICPNTRVIPGQMTAMLRRNFGLNDVLGLNGEKNRNDHRHHAVDACVIAVTDQGLLQRFAAASASARERQLNRLVENMPLPWESYREHVRRAIDGIWVSHRPDHSHEGAMHNDTAYGLRGNGRVSFHKMVEGKREYIEDNLKVIEITDTKAIDRHGLLPTGKPRPYKGYKGDSNYCIEIVRNEKGRWEGEIISTFDAYQLVRKYGIVQLRYPVLSVSGKPLVMRLIRNDFVRLEHEGITRTLRVCKMREDGQVALADVTEANVDARTRTKEICYVFKTGGSLQKAKARRITISPIGELRDPGFKE

SEQ ID NO: 211 - protein, 1045 aa, Acidovorax avenae
MQKEKPLAYRLALDLGSTSLGWAVLRLSAPGEPSAVIRAGSRIFSDGRNPKDGSSLAVTRRAARAMRRRRDRLLKRKARMLAALERHGFFPQDEAARKALEKLNPYGLRARGLESALKPEEFGRALFHLNQRRGFQSNRKTDRKDSDSGALKQAIGTLRAQMHESGCRTVGEWFWKVRMERKPEGVKGQGVRARYRETPFTTDEGKKRIDKRYDLYVDRAMVAQEFDALWAAQATFAPALFNEAARAELRDILLHQRKLRPVQPGRCTLVPEEPRALLALPSTQRFRIYQEVNHLRVLHDELREEALTLAQRDQIVALLERQAKVTFTAMRKALGFSALFNLEDAKRDGLKGNATTAALGKKDLFGPLWAGFDTALQDEIVTQLMTEESEPRLIAWLQEHTGVDEARAQAIANAGLPEGYGSLGRTALARIVPELQRDVITYDKAVQAAGFAHHSDLGFSFEHDADEVERIGERTIASTGEIKPVFAFKQLPYYGRALQRHVAFAKENPRNDEERYGKIANPTVHIGLNQVRVVVNALMCRYGRPTEVVIELARDLKQSREQKLEAQQRQADNQKRNARIRRSIAEVLGISEERVRTLDIQKWILWEELSHDAADRRCPYSGVQISASMLLGERVEIEHILPFSMTLDDSLNNRTVALREANRIKRNRTPWDARTDFEAHGWSYDGILQRAERMPQRKRHRFAPDGYERWLGEDKDFLARALNDTRYLSRVAAEYLRLVCPGSATRVIPGQMTALLRGKFGLNDVLGLDGEKNRNDHRHHAVDACVIGVTDQRMMQRFAQANAQAREDGLTRLVEDMPLPWPTYRAHVERAVRHIWVSHKPDHGFEGAMMEETSYGILRDGTIKQRRKADGSAGREISRLIRITEPSQPQRHGVDAEGRPLPYKGYVGGSNYCLEITVNDKGKWEGQVISTFDAYRIVREGGLRQLRHSTQGQNGQALAMRLVIGDSVRLEVDEQERVMRIVKINGNNGQVFMAPVHEANVDARNSDKNEAFAYTSKIAGSFQKTKARQVTISPIGELRDPGFKG

SEQ ID NO: 212 - protein, 1218 aa, Prevotella denticola
MKASEEKLSKGLSTYMKENNLLTVGAAFAQLEDEGVRIRNNNNYRAIRSQFQHEIETIFMFQQGLSENELYERLVSEKKNIGTIFYKRPLRSQRGNVGKCTLERTKPRCAIGHPLFEKFRAWTLINNIKIRMSEEEQAEQLPMKLRFELYNDCFLAFVRAEFKFEDIRKYLEKRLGVHFSYNDKTINYKDSTSVAGCPITARFRKLLGEDWESFHVDGQKQRQAHGKNNASFHTVSYSTNDIWHFCYDAEEPEAVLSFAQDNLKWEKKKAEELVRIWSAIPQGYAMLSQKAIRNINKMLILGLKYSDAVLLAKVPEIVEITDGEILSVTEDYHRVEAQVGYEKQINNIVNALIAKYKSASEEYRFADHNYEYQLDKSDEKDIIKQIESNIGTRKWSLLDADEQTDILQKVRDKYQNFFRSHERKFVESPKLGECFEEYLMKKFPMVEGEQWKKLYHPSQIAIYRPVSAGKDRSALRLGNPDIGAIKNPTVLRVLNTLRKRVNQLLDDGLISPDETRVVVETARELNDANRKWALDNYNRIRHDENEKIKKILEEFYPKRDGISTDDIDKARYVIDQREMDYFTEEKPYNKDIKKYKLWLEQGGQCMYTGRTINLSNLFDPNSFDVEHTIPESISFDSSDMNLTLCDAHYNRFIKKNHIPADLPNYDKSVVIDGKEYSPIKPRLQRWADRVERLNRNVEYWRGQARRAQNKDRKDQCMREMHLWKMELEYWTKKLERFTITEVTDEFKNSQLVDTRVITRHAVLYLKSIFPHVDVQRGDVTAKFRKILGIQSVDEKKDRSLHSHHAIDATTLTIIPGAAKRERMLELFAKIEEVNKMLSFSGNEDRTGLKQELDGLKNQLNKEVKACRIGHNVSEIGTFINDNIIINHHVKNQALTPVRRRLRKRGHIVGGMDNPRWQTGDALRGEIHKASYYGAITQFAKDKDGKVLLKEGHPLVDPTIKFVIRRELKYKKSTADSGFASWDDLEKAIVDKELFALMKGQFPEETSFKDACEQGIYMIKKGKNGEVDTKLYRIRHIRCKTKQKNALKIKEQAYKSEKEYKRYFYAAVGDLYAMCCYTNGKTREFKIYSLYDISCHRKVGVEDIPEFITDKKGNRLMLDYKLHTGDMILLYKENPEELYDLDNVSLSKLLYKINGFENDGLRIRMVNHLVAKEAMGESVKDYAKLPDIIRCGVKTIKFLVMGENRDFVIKNGKISFNHR

SEQ ID NO: 213 - protein, 1458 aa, Fluviicola taffensis
MTKTILGLDLGTNSIGWALINQDFDNKKGEILGMGSRIIPMTQDIKDEFGKGNSISQTAERTRLRGVRRLIHRTLLRRERLHRVLNIIGFLPEHYANQIDFEKRFGKFKPESEPKISFDGNDVFLFEKSYQEMLVDFKIHQPQLVSNGKKIPHDWTIYYLRKKALSKKIEKEELAWILLNFNQKRGYYQLRGEEEEETPNKLVEFHSLKIVEVNADEPQKGKPEIWYSLVLENGWVYRRASKTPLFDWKDKIREFIVTTEINNDGTVKTDKEGTEKRSFRAPKPEDWTLQKKKTEFELSKSGNEVGAFIYESILQKPNQKIRGKLISTIERKFYKEELKTILKTQLFFHKELKDEKLYNACIEELYKNNEAHRSLLSNKGFEHLFINDILFYQRPLRSKKSQISNCPLEKRTYKKEGIEITEGIKVISKSNPIYQEFRLWQWISNLSLYCIEPTETNVTSTFLNSIEDYENLFEFLNNRKEIEQKHLLKYLLENQGFKGKLLTNELEKFRWNFVADKKYPCNETGSLLHTRLSKVKNISPDFLTKEIEHQLWHIIYSVTDKIEYEQALKTFARKNNLDVDSFFEHFKKIPPFESTYGAYSEKAIKKLLPLIRLGKYWNWEAIDSISKDRISKILSGEYDENIKNRVREKAVHLTSENNFQGLQEWLAKYIVYDRHSEGNDLGKWTSVSDLETYLKEFKQHSLRNPIVEQVITETLRVVKDIWIKHGKGTENFFDEIHVELGREMKNNSEDRKRLTNTITENENTNLRIKALLMEMMNDNDVENVRPYSPSQQEILKIYEDGALNSNIELDDEIVKISKKAEPTKSELQRYKLWLEQKYRSPYTGQVIPLNKLFTSEYEIEHVVPQSRFFDDSFSNKVICESAVNKRKDNQLGLQFIKNHSGEKVELGFGKVVQVFTEEQYLDFVKEHYSKNRSKHNKLLLEEIPEKMIERQLNDTRYISKFVSSILSNIVRSEKDDDGLNSKNILPGNGKITTELKRDWGLNDVWNDLILPRFERMNTITNSDLFTTYNDKYQKHLPTVPFEYSKGFQKKRIDHRHHAMDALVIACATRDHLNLMNNQSAKSELKRYDLQNKLRKKEPYFNQKENKQKEAFKDFIKPWGTFTEDSKNALEKIIISFKQNLRVINKATNSYESYKDEDGNLRIGKDGKPEKGLIKQKGLNWAIRKPLHKDTVSGQINLSRIKLPNGKILTATRKNLDTSFDLKTIENSITDTGIQKILKNYLLSKESPELAFSPEGLEEMNNEIEKYNNGKFHHPINKARIYELGSKFNVGQTGNRRDKFVEAAKGTNLFFAIYQDENKNRSYETIPLNEVIEHQKWRASLPKEEQEKIPLVPVNKLKGTFIFSLSPNDLVYVPSNDELERSASIDFSKLKKEQINRLYKMVSSSGSQCFFVKSEVATSVVNKMEYSSLNKMEKSIDNLMVKEICIKLKIDRLGNISKA

SEQ ID NO: 214 - protein, 1384 aa, Coriobacterium glomerans
MKLRGIEDDYSIGLDMGTSSVGWAVTDERGTLAHFKRKPTWGSRLFREAQTAAVARMPRGQRRRYVRRRWRLDLLQKLFEQQMEQADPDFFIRLRQSRLLRDDRAEEHADYRWPLFNDCKFTERDYYQRFPTIYHVRSWLMETDEQADIRLIYLALHNIVKHRGNFLREGQSLSAKSARPDEALNHLRETLRVWSSERGFECSIADNGSILAMLTHPDLSPSDRRKKIAPLFDVKSDDAAADKKLGIALAGAVIGLKTEFKNIFGDFPCEDSSIYLSNDEAVDAVRSACPDDCAELFDRLCEVYSAYVLQGLLSYAPGQTISANMVEKYRRYGEDLALLKKLVKIYAPDQYRMFFSGATYPGTGIYDAAQARGYTKYNLGPKKSEYKPSESMQYDDFRKAVEKLFAKTDARADERYRMMMDRFDKQQFLRRLKTSDNGSIYHQLHLEELKAIVENQGRFYPFLKRDADKLVSLVSFRIPYYVGPLSTRNARTDQHGENRFAWSERKPGMQDEPIFPWNWESIIDRSKSAEKFILRMTGMCTYLQQEPVLPKSSLLYEEFCVLNELNGAHWSIDGDDEHRFDAADREGIIEELFRRKRTVSYGDVAGWMERERNQIGAHVCGGQGEKGFESKLGSYIFFCKDVFKVERLEQSDYPMIERIILWNTLFEDRKILSQRLKEEYGSRLSAEQIKTICKKRFTGWGRLSEKFLTGITVQVDEDSVSIMDVLREGCPVSGKRGRAMVMMEILRDEELGFQKKVDDFNRAFFAENAQALGVNELPGSPAVRRSLNQSIRIVDEIASIAGKAPANIFIEVTRDEDPKKKGRRTKRRYNDLKDALEAFKKEDPELWRELCETAPNDMDERLSLYFMQRGKCLYSGRAIDIHQLSNAGIYEVDHIIPRTYVKDDSLENKALVYREENQRKTDMLLIDPEIRRRMSGYWRMLHEAKLIGDKKFRNLLRSRIDDKALKGFIARQLVETGQMVKLVRSLLEARYPETNIISVKASISHDLRTAAELVKCREANDFHHAHDAFLACRVGLFIQKRHPCVYENPIGLSQVVRNYVRQQADIFKRCRTIPGSSGFIVNSFMTSGFDKETGEIFKDDWDAEAEVEGIRRSLNFRQCFISRMPFEDHGVFWDATIYSPRAKKTAALPLKQGLNPSRYGSFSREQFAYFFIYKARNPRKEQTLFEFAQVPVRLSAQIRQDENALERYARELAKDQGLEFIRIERSKILKNQLIEIDGDRLCITGKEEVRNACELAFAQDEMRVIRMLVSEKPVSRECVISLFNRILLHGDQASRRLSKQLKLALLSEAFSEASDNVQRNVVLGLIAIFNGSTNMVNLSDIGGSKFAGNVRIKYKKELASPKVNVHLIDQSVTGMFERRTKIGL

SEQ ID NO: 215 - protein, 1077 aa, Neisseria bacilliformis
MQQKPQRYILGLDLGIASVGWACVWADENEHPTGLLDCGVRTFERAEVPKTGDSLALARRQARSVRRLIRRRAHRLLRLRRLLKREGVLLSADFNENGLVRGLPIDAWALRVAGLDRKLSNKEWAAVLLHLVKHRGYLSQRKNETQSKDKELGRLLAGVNGNREALQNRSDEYRTAAELAVKKFAAENNGSLRNKGGDYSHTFDRKDLQRELHLLFERQRALDNPFTSSEMEAAVDELLMKQRSALQGEAVLKMLGRCTFEPSEYKAAKNTYSAERFVWLTKLNNLRIQYNGEERALSEAERRLLLDEPYQKAKLTYKQVRTILELPESAVFKGLRYGHGEDGLKAESGTLMEMKAYHAVRKALKDAGLEGEWENRIRNPELLDAIGTAFSLYKTDEDIRANLAAFRLSENVLEALLAGLNFDKFVHLSLKALAKILPLMEQGMRYDEACKEAYGDHYGAKEQEDHRLLPPFVADDIRNPVVFRTLTQARKIVNEIVRRYGSPLRVHIETGREVGKSFSDRKEIEKRQEENRKERERAAAHFKELFPNFAGEPKAQDILKLRLYEQQHGKCLYSGKEIDLRRLPEKGYVEIDHALPFSRTWDDSFNNKVLVLGKENQDKRNRTPYEYLDGKGNSGAWRAFAERVSGCRFPYAKKQRLLTQKLDEKTEQGFLERNLNDTRYVARFLCQFIEEKMHLEGAGKKRVFASNGQITALLRGFWGLKKVREENDRHHALDAVVVACSSVSMQQKITRHFRYREELEHIDRETGEVIHGFPQPWEFFRQEVMTRVFSDDPVSELAEKLDSRPEAVHEFVTPLFVSRAPHRKVTGQGHLETIRSAKRLDEKISVVKLPLTQLKTKDIERIVGYPNREPALYDALAARLAAFKDDPAKAFSEPFYKTGKDGKCGVLVKAVRVENVQKSGLLVRKDESGKMQGVADNATMVRVDVFGKNGKNYLVPVYAWQVEKGELPNRAVVAYADEEDWDEMDDSFEFKFSLYPNDLVEVVTKKDKFFGYYSGFNRATGAINIKEHDLSKSKVKNGVYEGIGVKTAQSFQKYQVDTLGKTIRLCKPEKRMGFKKK

SEQ ID NO: 216 - protein, 1029 aa, Alicycliphilus denitrificans; identical to SEQ ID NO: 193

SEQ ID NO: 217 - protein, 1122 aa, Streptococcus suis; identical to SEQ ID NO: 87

SEQ ID NO: 218 - protein, 1428 aa, Parasutterella excrementihominis
MGKTHIIGVGLDLGGTYTGTFITSHPSDEAEHRDHSSAFTVVNSEKLSFSSKSRTAVRHRVRSYKGFDLRRRLLLLVAEYQLLQKKQTLAPEERENLRIALSGYLKRRGYARTEAETDTSVLESLDPSVFSSAPSFTNFFNDSEPLNIQWEAIANSPETTKALNKELSGQKEADFKKYIKTSFPEYSAKEILANYVEGRRAILDASKYIANLQSLGHKHRSKYLSDILQDMKRDSRITRLSEAFGSTDNLWRIIGNISNLQERAVRWYFNDAKFEQGQEQLDAVKLKNVLVRALKYLRSDDKEWSASQKQIIQSLEQSGDVLDVLAGLDPDRTIPPYEDQNNRRPPEDQTLYLNPKALSSEYGEKWKSWANKFAGAYPLLTEDLTEILKNTDRKSRIKIRSDVLPDSDYRLAYILQRAFDRSIALDECSIRRTAEDFENGVVIKNEKLEDVLSGHQLEEFLEFANRYYQETAKAKNGLWFPENALLERADLHPPMKNKILNVIVGQALGVSPAEGTDFIEEIWNSKVKGRSTVRSICNAIENERKTYGPYFSEDYKFVKTALKEGKTEKELSKKFAAVIKVLKMVSEVVPFIGKELRLSDEAQSKFDNLYSLAQLYNLIETERNGFSKVSLAAHLENAWRMTMTDGSAQCCRLPADCVRPFDGFIRKAIDRNSWEVAKRIAEEVKKSVDFTNGTVKIPVAIEANSFNFTASLTDLKYIQLKEQKLKKKLEDIQRNEENQEKRWLSKEERIRADSHGICAYTGRPLDDVGEIDHIIPRSLTLKKSESIYNSEVNLIFVSAQGNQEKKNNIYLLSNLAKNYLAAVFGTSDLSQITNEIESTVLQLKAAGRLGYFDLLSEKERACARHALFLNSDSEARRAVIDVLGSRRKASVNGTQAWFVRSIFSKVRQALAAWTQETGNELIFDAISVPAADSSEMRKRFAEYRPEFRKPKVQPVASHSIDAMCIYLAACSDPFKTKRMGSQLAIYEPINFDNLFTGSCQVIQNTPRNFSDKTNIANSPIFKETIYAERFLDIIVSRGEIFIGYPSNMPFEEKPNRISIGGKDPFSILSVLGAYLDKAPSSEKEKLTIYRVVKNKAFELFSKVAGSKFTAEEDKAAKILEALHFVTVKQDVAATVSDLIKSKKELSKDSIENLAKQKGCLKKVEYSSKEFKFKGSLIIPAAVEWGKVLWNVFKENTAEELKDENALRKALEAAWPSSFGTRNLHSKAKRVFSLPVVATQSGAVRIRRKTAFGDFVYQSQDTNNLYSSFPVKNGKLDWSSPIIHPALQNRNLTAYGYRFVDHDRSISMSEFREVYNKDDLMRIELAQGTSSRRYLRVEMPGEKFLAWFGENSISLGSSFKFSVSEVFDNKIYTENAEFTKFLPKPREDNKHNGTIFFELVGPRVIFNYIVGGAASSLKEIFSEAGKERS

SEQ ID NO: 219 - protein, 1371 aa, Lactobacillus buchneri
MKVNNYHIGLDIGTSSIGWVAIGEDGKPLRIKGKTAIGARLFQEGNPAADRRMFRTTRRRLSRRKWRLKLLEEIFDPYITPVDSTFFARLKQSNLSPKDSRKEFKGSMLFPDLTDMQYHKDYPTIYHLRHALMTQDEKFDIRMVYLAIHHIVKYRGNFLNSTPVDSFKASKVNFVDQFKKLNELYTAINPEESFQINLANSEDIGHQFLDPSIRKFDKKKQIPKIVPVSVDDKATDKINGKIASEIINAILGYKSKLDVVVQCTPVDSKSWALKFDEEDIDAKLQKILPEMDENQQSIIAILQNLYSQVTLNQIVPNGMSLSESMIEKYNDHHDHLKLYKKIIDQLADPKKKAALKKAYSQYVGDDGKVIEQADFWSSVKKNLDDSDLSKQIMDLIDAEKFMPKQRTSQNGVIPHQLHQRELDEIIEHQSKYYPWLAEINPNKHDLHLAKYKIEELVAFRVPYYVGPMITPDDQAKSAETVFSWMERKGKEAGQITPWNFDEKVDRNASANRFIKRMTTKDTYLIGEDVLPDESLLYEKFKVLNELNMVRVNGKLLKVADKQAIFQDLFENYKHISVKKLQNYIKSKTGLPSDPEISGLSDPEYFNNSLGTYNDFKKLFGNKVDEPDLQDDFEKIVEWSTVFEDKRILREKLNEITWLSDQQKDVLESSRYQGWGRLSKKLLTGIVNDQGERIIDELWNTNKNFMQIQSDNDFAKRIHEANADQMKAVDVEDVLADAYTSPQNKKAIRQVVKVVDDIQKAMGGVAPKYISIEFTRSEDRNPRRTISRQRQLENTLKDTAKSLAKSINPELLSELDNAAKSKKGLTDRLYLYFTQLGKDIYTGKPINIDEISTYDIDHILPQAFVKDDSLNNRVLVSKAINNGKSDNVPVQLFGAKMGHFWKQLAEAGLISKRKLKNLQTDPDTISKYAMHGFIRRQLVETSQVIKLVANILGDKYRNDNTKIIEITARMNHQMRDEFGFIKNREINDYHHAFDAYLTAFLGRYLYHRYIKLRPYFVYGDFKKFKEDKVTMRNFNFLHDLTDDTQEKIADAETGEVIWDRENSIQQLKDVYHYKFMLISHEVYTLRGAMFNQTVYPASDAGKRKLIPIKADRPINVYGGYSGSADAYMAIVRIHNKKGDKYRVVGVPMRARDRLDAAKKVSDADCDRALKDVLTPQLTKTKKSRKTGEITQVVEDFEIVLGKVMYRQLMIDGDKKFMLGSSTYQYNAKQLVLSDQSVKTLASKGRLDPLQESMDYNNVYTEILDKVNQYFSLYDMNKFRHKLNLGFSKFISFPNHNVFDGNTKASSGKREILEEVLNGLHANPTFGNLKDIGITTPFGQLQQPNGILLSDEAKIRYQSPTGLFERTVSLKDL

SEQ ID NO: 220 - protein, 1090 aa, Sphingomonas sp.
MDWRLGLDLGANSLGWAALRLDRAGDPIGILAMGSRIFSDGRDPKSGASLAVDRRAARAMRRRRDRFKQRQAALLKYLIRDGLFPADQADRQRLADEDPYALRARALDEELSLFEIGRALFHLNQRRGFQSNRKADRGQDDEAGKIAVGVDRLNQQMEEQGARTLGEFLHQRRRAATDANHIPSVRTRLRPETGEGAKGDGYDFYPSRALIAEEFEEIWAAQAPHYPDTLTQQVHDRLYEIIFHQRPLRAPQVGQCTLVAGETRLPKAHPLFQKRRLLEEINALMIVRPGEIAQRLTPEERDTLYLKLKDKRTVSFATLRKTLKLDSAARFNKESENRTELKGDEVAAELGAKTRLGTRWQHLSGDQQWEVVHRLMALESQADEAAFRDWISQTYDLLPEQAAAVLGARLPQGHGRFGPTATTTLIDSLLHDRTEDGRVVVYSEAVQRSGLGHHSDLRHDRDDEDVTELPYYGVALERHIMPGTAEPTDPEEMRIGRLTNPTVHIGLNQLRHVVNRLIRAYGPPKEIAIELARELKLSEDEKKKRNSENRDNRLAAEGRSKKLEEIRQRDTGANRALLKLWEELNPGNVLDRRCIYTGEQISIDMLFSDRVEVDHILPFAQTLDDSNGNKLLCLREANREKRRRSPYEAWGHTDRWPDIAERASRLPKPKRWRFEPDAMQRFATEDGFLARHLVDTQYLGRLAREYLSWLYPGRGEGSGHVWVSPGRLTEMVRRKLGLNDLLPDHNFGGGADQPKNRLDHRHHAIDALVVAIVDRGMLQAIARASGQDGSEGRERIHIPAPWDGFRDDLRVAVNGIIVSHRPDHGTVAKAGLARGRDQTAGRLHNDTAYGLTGETDAKGNSIVVRRIPLSAIKKPADIARVRDPLLRNALAEFTKGLDGKAFEARIGRFHELGPLLYRGIRRVRVVETLTVIPIRDAEGRAYKGYKGDSNYRYDVWEMPDGKWRCQVVSMFDAHQSTEQARPHPAARKILSLQRNDILAIERTEGDRELVRVVKFSEKQFAVAPPHEGGSLKTRDGNADDPFRYLYPSPNTLKGWRARQVRIDELGRVLDPGFPARKSVRRTRPRAAPVD

SEQ ID NO: 221 - protein, 1000 aa, Kingella kingae
MARAQRRLISRRANRMNKLRRLLKQENVLQANDYDEKGLIIGLPNQAWELRAQGLDRKLEPKEWAAVLINLVKHRGYLSQRKNESQTADKELGALLSGMNHNHQLLQSQSNQYRTPAELAIKQFATQDGHIRNQRGAYTHTFNRLDLQNELNQLFDAQTRLGNPHVSGSLKTAINDLLMNQKAALSGDAILEMLGRCTFEPSEYKAAKNTYSAERFVWLGKLTNLRIQDNGLESALSREQRELLLNEPYNKTKLTYQQVRKLLRLPETAFFKGLRYGKDNAESATFMEMKSYHAIRKSLENKSLKSEWEKLKTQPKLLDLIGTAFSIYKTDDEIAGCLKNQLPENVIIALQEQLNFSNFMELSLKALEKLLPLMEQGLRYDEACTQIYGNRHEKIADKTEKFLPNIPADKLRNPVVLRTLTQARKVINAIIRRYGSPARVHIETGREVGKSFSDRDKLKKQQEENQEQRRRAIDEWKQFFPNAAHEPKAVDILKLRLYQLQQGKCLYSGLPIDVRRLPEKGYVEIDHALPFSRTWDDSFNNKILVLASENQNKGNQTPYEYLRGADNSESWRLFVENVQNCQFSPNKKQKIMAKQLDEKGFLERNLNDTRYVSRFLCQFISEHLHLTGKGKKRVFASNGQITALLRGRWGLSKNREENDRHHAVDAVVVACSTVAMQQKITQFVRYQKGNVFTGERIDKETGEVISIHFPTPWEHFREEVMIRVFDDNPLRTLPEKLPNRPEALHEYVMPLFVSRMPTRKMTGQGHKETIKSAKRLDEKISVLRVPLTQLKLNDLENMVNREREPALYEALKARLEQFKNDPAKAFAEPFFKQGGQQVKAVRVEIVQKSGMLLRKINGVADNGSMVRVDVFEKSGKFYLVPIYAWQVAEGILPNYAVVAHKDESDWILMDESYHFKFALYKNDLLEVQTKKGGIMGYFASLDRATGAITIREHDRDKKKCKDGEHRSIGVKMASSFKKLQVDELGKNIHETRSRKRPNIG

SEQ ID NO: 222 - protein, 1130 aa, Streptococcus pasteurianus
MTNGKILGLDIGIASVGVGIIEAKTGKVVHANSRLFSAANAENNAERRGFRGSRRLNRRKKHRVKRVRDLFEKYGIVTDFRNLNLNPYELRVKGLTEQLKNEELFAALRTISKRRGISYLDDAEDDSTGSTDYAKSIDENRRLLKNKTPGQIQLERLEKYGQLRGNFTVYDENGEAHRLINVFSTSDYEKEARKILETQADYNKKITAEFIDDYVEILTQKRKYYHGPGNEKSRTDYGRFRTDGTTLENIFGILIGKCNFYPDEYRASKASYTAQEYNFLNDLNNLKVSTETGKLSTEQKESLVEFAKNTATLGPAKLLKEIAKILDCKVDEIKGYREDDKGKPDLHTFEPYRKLKFNLESINIDDLSREVIDKLADILTLNTEREGIEDAIKRNLPNQFTEEQISEIIKVRKSQSTAFNKGWHSFSAKLMNELIPELYATSDEQMTILTRLEKFKVNKKSSKNTKTIDEKEVTDEIYNPVVAKSVRQTIKIINAAVKKYGDFDKIVIEMPRDKNADDEKKFIDKRNKENKKEKDDALKRAAYLYNSSDKLPDEVFHGNKQLETKIRLWYQQGERCLYSGKPISIQELVHNSNNFEIDHILPLSLSFDDSLANKVLVYAWTNQEKGQKTPYQVIDSMDAAWSFREMKDYVLKQKGLGKKKRDYLLTTENIDKIEVKKKFIERNLVDTRYASRVVLNSLQSALRELGKDTKVSVVRGQFTSQLRRKWKIDKSRETYHHHAVDALIIAASSQLKLWEKQDNPMFVDYGKNQVVDKQTGEILSVSDDEYKELVFQPPYQGFVNTISSKGFEDEILFSYQVDSKYNRKVSDATIYSTRKAKIGKDKKEETYVLGKIKDIYSQNGFDTFIKKYNKDKTQFLMYQKDSLTWENVIEVILRDYPTTKKSEDGKNDVKCNPFEEYRRENGLICKYSKKGKGTPIKSLKYYDKKLGNCIDITPEESRNKVILQSINPWRADVYFNPETLKYELMGLKYSDLSFEKGTGNYHISQEKYDAIKEKEGIGKKSEFKFTLYRNDLILIKDIASGEQEIYRFLSRTMPNVNHYVELKPYDKEKFDNVQELVEALGEADKVGRCIKGLNKPNISIYKVRTDVLGNKYFVKKKGDKPKLDFKNNKK

SEQ ID NO: 223 - protein, 1119 aa, Lactobacillus coryniformis
MGYRIGLDVGITSTGYAVLKTDKNGLPYKILTLDSVIYPRAENPQTGASLAEPRRIKRGLRRRTRRTKFRKQRTQQLFIHSGLLSKPEIEQILATPQAKYSVYELRVAGLDRRLTNSELFRVLYFFIGHRGFKSNRKAELNPENEADKKQMGQLLNSIEEIRKAIAEKGYRTVGELYLKDPKYNDHKRNKGYIDGYLSTPNRQMLVDEIKQILDKQRELGNEKLTDEFYATYLLGDENRAGIFQAQRDFDEGPGAGPYAGDQIKKMVGKDIFEPTEDRAAKATYTFQYFNLLQKMTSLNYQNTTGDTWHTLNGLDRQAIIDAVFAKAEKPTKTYKPTDFGELRKLLKLPDDARFNLVNYGSLQTQKEIETVEKKTRFVDFKAYHDLVKVLPEEMWQSRQLLDHIGTALTLYSSDKRRRRYFAEELNLPAELIEKLLPLNFSKFGHLSIKSMQNIIPYLEMGQVYSEATTNTGYDFRKKQISKDTIREEITNPVVRRAVTKTIKIVEQIIRRYGKPDGINIELARELGRNFKERGDIQKRQDKNRQTNDKIAAELTELGIPVNGQNIIRYKLHKEQNGVDPYTGDQIPFERAFSEGYEVDHIIPYSISWDDSYTNKVLTSAKCNREKGNRIPMVYLANNEQRLNALTNIADNIIRNSRKRQKLLKQKLSDEELKDWKQRNINDTRFITRVLYNYFRQAIEFNPELEKKQRVLPLNGEVTSKIRSRWGFLKVREDGDLHHAIDATVIAAITPKFIQQVTKYSQHQEVKNNQALWHDAEIKDAEYAAEAQRMDADLFNKIFNGFPLPWPEFLDELLARISDNPVEMMKSRSWNTYTPIEIAKLKPVFVVRLANHKISGPAHLDTIRSAKLFDEKGIVLSRVSITKLKINKKGQVATGDGIYDPENSNNGDKVVYSAIRQALEAHNGSGELAFPDGYLEYVDHGTKKLVRKVRVAKKVSLPVRLKNKAAADNGSMVRIDVFNTGKKFVFVPIYIKDTVEQVLPNKAIARGKSLWYQITESDQFCFSLYPGDMVHIESKTGIKPKYSNKENNTSVVPIKNFYGYFDGADIATASILVRAHDSSYTARSIGIAGLLKFEKYQVDYFGRYHKVHEKKRQLFVKRDE

SEQ ID NO: 224 - protein, 1126 aa, Lactobacillus farciminis
MADRISLGLDIGVASVGFSVLDIDKGKVIELGARLFSATVAAGNQDRRDMRGARRLLNRNKQRRQDTGKLFKKFGLIDDFDKGSFYDNFNQNLNPYELRVKGLTEQLTKEELAESLYQIVKHRGISYALKDADVDEGGTDYSVSLKINSQELAEKTPAQIQLQRLNDYGKVRGQVVIGDDPDNQKVLLNVFPTSAYEKEAKQIIATQQQFYPESLTDKFTEEYCQILTRKRDYFVGPGNEKSRTDYGIYKTDGRTLDNLFEELIGHDKIYPEELRASAASYTAQLFNVLNDLNNLRILNYEDGKLTKEDKEKIIAEIKNNTTTINMLNVIKKVAGCSKDDIKGFRVNEKDKPEISSMPVYRKIHKDLLKAGVDISDWPVEFIDELSFILTLNTENGEIRKQLNNRLAPKFDFLNADLIQLIIDNKDSFEIKTNNKWHRFSVKTMNKLIPEMMERPVEQMTLLNEMGLVKKDKKRFENNKYLPYKEIAKDIFNPVASKSVREALKIVNAVLKKYGHIDYLVVEMPRDKNLKEEQDNIKEFQNKNKKAKDAAFEAFVKSVGSEQRVKEALSKNRKLQMKMRLWYQQQEIDPYNGKTIDATDLINNPDKFEIDHIIPQSISFYDSINNKTLCFASMNQVKGQKTPYEFMLEGHGQSYDKFKATVMANKNFGKAKRANYLFEENVSDIETRKRFLSRNLVDTRYSSRVVLNSLQDFFREKSADTKVTVIRGKFTSNMRKHWHIDKTRETFHHHAIDASIIAATPFLRMWKKGGTIFPVKVGEESIDIETGEILDDKNFDKAMYEEPYSGFVSEIMNADDRIKFSHQVDKKMNRKVSDATIYSTRTGKLAKDKKDAEYIVAKVKDIYSVDGFKKFKKVYDKDKTKFLLYKYDPRTFSKLERIISDCPDKVEKVQTNGKVKAVDISPFEMYRRDHGMIKKYSKKGNGPAIKQLKYLDKKLGSHIDITPANANGKHVILQSLKPWRTDVYLNHETGEYEIMGIKYSDLKFNKNEGYGIKKDKYLEIKKVEEVSEKSEFMFSLYRKDRVKVQDMKTGESVELLFWSRNFSNKKYAELKPISQAENDKKLPVYGKGRLIKRLIPKNCKIWKVNTTILGDPYYLEKESDSPKDILD

SEQ ID NO: 225 - protein, 1380 aa, Eggerthella sp.
MNLRHVGNYNIGLDMGTASVGWAAIDEQGELLHFKGKPTWGSRLFDSANTAATARMPRGQRRRYIRRRWRLDLLQKFFSEEMAEKDPEFFIRLRQSSLWPEDREGGHTAYHWPLFNDSDFNEKEYYEKFPTIFHLRQWLMETDEKADIRLIYLAFHNIVKHRGNFLQENNDSLSAQNANMRESLESFCIALEEWCDEKELTCSCDPQKLEHLFKEVKYRSDIRDGFAALLGLACSGENEVDVKAMAKEMGKAIVGYKADFSKIFTECDKEGSSFRLSDDEGPEAFLDICPDDGIALFEAIQMVYSSFILTGMLTEKGLSLSKISAYNQYGQDLESLKALVKEYVPNEYSSFFRGPTYSGSTEYDPSKAQGYTRYNLGPSKKGSGAKPMAYEDFKKSVEQLFANTNAINDERYKEMMGRFAEEKFLRRLRTSDNGRIPFQLNLEEMTAIIINQGKYYPFLLEQQEKLESLVRFRIPYYVGPLTRINARLDSKGNACFAWSKRKDGMDSASIKPWNWDEVIDKHASAQAFIERMTGTCTYLRGEPVLPRCSLLYEEYCVLNELNGARWTQDGDKFIRFDYKDRSDIIEELFKKRRGRIQYAAVADWMKQERSHANVHVSGGQGENAFESRLSSYHFFCNDVFGVDELPGSYVDMVEEIILWSTLFEDRSILREEIQRKYGDVLNEEQIKTICKKRFSGWGRLSRKLLCSLKAQTDNGPKSIMDILQEGDQNNGRVGRAMVFQEILHDEQLGFEQKIEEENTQSMLEGENLLIEDLPGSPAIRRSINQAVRIVDEIVGIAGHAPDNIFIEVTREDDTKKKGKRTTTRYSNIQKALEALKEEGAEALRELKTYKHNELDKRLSLYFMQNGKSLYSGIPLDIRRLSEYQIDHIIPQSYIKDDSYENMALVLPGENQSKADNLLISQDIRIKMKATWTALHKAGLMGDKKYNNLMNSSISDAKMKGFINRQLVETSQSVKLTQMMLSQKYPGAKVRPIKASISSQLRDACDLVKCREANDYHHAHDAYLACQVGRFVLKRHSSMFDNPIGMTKVIRDFVKRQGQEFKRNGKLPAYASRSGFIVQSFMRSGFDAETGELLRDDWNAPFEIARIKRCLNYRDCYISRMPMEDSGAFWDATIYSPKAGKKGALPVKQGLPVEKYGSYSREQFAYFFVYKAYNPKKKAYRLEFEAVPVRVASAVETRENALEEYAKSVAKQAGLEFVEVARPKVYKYQLIELGEDRLYITGKREVRNASQLAFSLDEIDLLKRLAEGEETSSEERERLFDVLIEKYARYAPRLARQLSVDSMSATFETLNAEEQLGILLSLVEIANGKRNMIDLSSAGGSKNAGCMNPTFSSELSSPGSNFTFIDQSVTGMFERRQRLEL

SEQ ID NO: 226 - protein, 1430 aa, Capnocytophaga canimorsus
MKHILGLDLGTNSIGWAVVKEAQNDNEQSEIVDVGVRVNPLTTDEKTNFEKGKPISTNADRTLKRSARRNLQRYKLRRKELIELLKEHQLISTDTILTENGKGTTFQTLELRAKSAKEKISLEELARVFLTINKKRGYKSSRKAKNEDEGQLIDGMEIAKRLYEENLTTGQLSLQLLKEGKKSLPDYYRSDLQFELDKVWNFQKQFHSHILTDEFYAQLKGKGQRATSALFLAKYQIYTAENKGSREDKKLQAYQWRVDALSKELTREQLAFVITEINNNLNNSSGYLGAISDRSKELYFNNETVGEYLWKQIAANPHTSLKNQVFYRQDYLDEFEQIWKTQSAFYPEILTDELKKELRDVVIFYQRKLKSQKSLVSFCEFENKEIEIKKEDGTSTKKVIGLKVAPKSSPLFQEFKIWQNLNNVLIRKKGSKTKKVDKNQQAVLFEEEKTIFELDLEAKQALFNELNLKGNLKAYYCLEILGYSPKEWEMNYSVLEGNRTNKALYEAYLKITDLEGYDAKNHLKVKLNKDEVELDDLKVPASEIKDMVQAIFKEAGINTDILHFNAELDGKDFENQASYQLWHLLYSYEGDDSKSGNELLYKLLETKFGFKKEYAQILANVSLSDDYGSLSTKAMRKIHPYIKENKFSTACELAGYRHSKHSLTKEENDNRVLKDSLEVLKKNSLRQPVVEKILNQMINLVNALLKKYRTENPNFKFDEIRIELARELKKNAEERANMTVNINKAKTEHEKIIKILKNEFGLPNPTRNDIIRYRLYEELKANGYKDLYTNEYIEKQDLFTKNIDIEHIIPKSRVFDDSFSNKTLSFRKTNLDKGERTAFDYIESKFGADKLEEYVARVEDLYKNNIISKAKYQKLLKKESEIGDGFVERDLRETQYIAKKAKEILLQITPNVLSTSGGITDRLREDWDLINVMKELNLPKYRALGLTQMEDRKYGQQVEVIIDWTKRNDHRHHAMDALTVAFTKHNHIQYLNYLNARKNEKHREHSNIMGIQQLETIKVTDKNGNEKRVFKAPMPNFRQVTKAFLENVLISHKAKNKVVTKNKNKVAGSNKVQEVLTPRGQLHKETVYGKYQYYVQKEEKIGGKFDLETIKKVANPLYQSLLKKRLEENGGDPKKAFTGKNSLAKNPIYLDDAQTEQLPEKVKLVWLENSFSIRKDITPENFKDEKLIDKILDEGVKRILKERLQSFGNDAKKAFSDLDKNPIWLNKEKGIAIKRVAISGVANAEPLHTKKDHLGKEILDKEGKSIPVDFISTGNNHHVAVYRDEKGNLQEKVVSVFEAVVRANQGLPIIDKTYNQHLGWEFLFTMKQNEMFVFSNESTGFNPNDIDLLDPKNKKIISPNLFRVQKFSKLQYGNSFVREFVFRHHLETTVEDRKELQGITYKQMKNSAFFNDIIKVRINHLGGIVSVGEY

SEQ ID NO: 227 - protein, 1348 aa, Finegoldia magna
MKSEKKYYIGLDVGTNSVGWAVTDEFYNILRAKGKDLWGVRLFEKAKTAADTRTFRSGRRRNDRKGVRLQILREIFEDEIKKVDKDFYDRLDESKFWAEDKKVSGKYSLFNDKNFSDKQYFEKFPTIFHLRKYLMEEHGKVDIRYYFLAINQMMKRRGHFLIDGQISHVTDDKPLKQQLILLINDLLKIELEEEFMDSIFEILADVNEKKTEKKNILKELINAQDFNKQEGKILYSIFESIVTGKAKIKNIISDEDILEKIKEDNKEDFVLTGDSYEENLQYFEEVLQENITLFNTLKSAYDFVILQSILKGKSTLSDAQVERYDEHKKDLEILKKVIKKYDEDGKLFKQVFKEDNGNGYVSYIGYYLNKNKKITAKKKISNIEFTKYVKGILEKQCDCEDEDVKYLLGKIEQENFLLKQISSINSVIPHQIHLFELDKILENLAKYYPSFNNKKEEFTKIEKIRKTFTFRIPYYVGPLNDYHKNNGGNAWIFRNKGEKIRPWNFEKIVDLHKSEEEFIKRMLNQCTYLPEETVLPKSSILYSEYMVLNELNNLRINGKPIDTDVKLKLIEELFKKKTKVTLKSIRDYMIRNNFADKEDFDNSEKNLEIVSNMKSYIDFNNILGDKFELEMVEDLIEKITIHTGNKKLLKKYIEETYPDLSSSQIQKIINLKYKDWGRLSRKLLDGITGTNIETGEIDTVINFLRNSSDNLMQIIGSQNYSFNNDIDKLRKKYIPQEISYEVVENLYVSPSVKKMIWQVIRITEEITKVMGYDPDKIFIEMAKSEEGKKTTISRKNKLLALYKAIKKDERDSQYEKLLTGLNKLDDSDLRSRKLYLYYTQMGRDMYTGEKIDLDKLFDSTHYDKDHIIPQSMKKDDSIINNLVLVNKNANQTTKGNIYPVPSSIRNNPKIYNYWKYLMEKEFISKEKYNRLIRNTPLTNEELGGFINRQLVETRQSTKAIKELFEKFYKKSKIIPVKAILASDLRKDMNTLKSREVNDLHHAHDAFLNIVAGDVWNREFTSNPINYVKENREGDKVKYSLSKYFTRPRKSKGKVIWTPEKGRKLIVDTLNKPSVLISNESHVKKGELFNATIAGKKDYKKGKIYLPLKKDDRLQDVSKYGGYKAINGAFFFLVEHTKSKKRIRSIELFPLHLLSKFYEDKNTVLDYAINVLQLQDPKIIIDKINYRTEIIIDNFSYLISTKSNDGSITVKPNEQMYWRVDEISNLKKIENKYKKDAILTEEDRKIMESYIDKIYQQFKAGKYKNRRTTDTIIEKYEIIDLDTLDNKQLYQLLVAFISLSYKTSNNAVDFTVIGLGTECGKPRITNLPDNTYLVYKSITGIYEKRIRIK

SEQ ID NO: 228 - protein, 1352 aa, Megasphaera sp.
MKKRNREEYYVGLDIGTSSVGWAVATPDYRIPKFRGHKMWGSRLFAEGKRAAERRQFRTNRRRLARRRDRLQILEELFAEEMAKVDNTFFMRLKESKFFLEDKTVKEKHILFSTDKFDADRFYKDNPTIYHVRKRLMEEEPQDIRELFLAVHHILKYRGHFLFAGSLEQNGASIEELVRTLLGKQGLAILDDTIDSNEMVNILKNTGETKSDRKKDVQELWNPLKDKVKKAQAAEMAGLVLGLKSDISKLFANSDYKDLDSSIKNINFSSGDYEEKRDDYANSIGDDIVLLDTMKALYDTLILSQILQGKRSISAAKVEDYNTHKEQLRALKAILKPHKRLYNEMFRENNKKDLSNYVAYISSYSEGKRVNREGFYKYVQAVLKQVDDSDSKQAILEAIRLETFLPLLRVKDNAVIPHQIHQAELEAILETARKKYNFLNDVSDGVSVKDKIIQLFTFRIPYYVGPLNPHSGETVADRKQGTGWVVRKQRGKVYPWNFADMVDVKASAEAFITNLTNKCTYLIGEDVLPKRSLLYSEFMLLNELNMIKYDGHELPVAIKQLYIEQVFKQEHKKQTKGRVLDFLKRNGLITGSATAVITGMDDAIKGDLQSYRDMVRIFGAGFDHSMAERIIRWVTLFGEAKDILENKIREVYGNSISDSQMRAIKKLKYADWGRLSQAFLIAVKGCDKSGVERNIITCLRASSQNLMEILSDQGTYIKQIKAWNHQHTTNMMDTLDYQLVDDLYVAPSVKRSIWQSLCIVEELVKIMGQAPKKIFVEVTRTKQAEKTKKDSRKKRLVELYTAIGKEGAAWKKEIEAHQAGDFRRKKLYLYYTQMGRCMYSNEPIAMDALFTSAYDIDHIYPQSLTKDGSWDNLVLVKSQLNKEKSDQYPLRPAIREKNKAHWQYLCRAGFISEKKYERLMRTTELTAEELSGFIARQLVETSQATKAVTGLLERIYTNTEICFVKAETVSQFRHQHNFIKIRELNNYHHAKDAYLNIVVGNVYHEKFTKNPWEFIARSTERRPYNLNRMYDFDLLKQGRVIWQVPKSLETVQAMMKSNDVRITKKLLVQKGELYDATITKAHKAKEGTYFPLKGADARLRDVHRYGGYEKIKIAYYSVFSCREKASNTIHTLIIPIPVYKAGLLQTEADLTAYAWQTKQKTKPIKDIYSAITPIYKKLCINTVVKIDGFKYFLGGKTGDYMWLDPAIPVVLDEQAAAYLKAISKVGRADDVENTAQAIDLITAEANEAFYDVLLKKMEAKIFAKAYQTIVEKLASETARERFRELSIGAQCSCLLEILNLLANNKTTFTFFKDKMGVTMSRRKQPMDLTKLEECIVYETSITGLYEKAVSLL

SEQ ID NO: 229 - protein, 650 aa, Haemophilus pittmaniae
MENKNLHYILGLDLGIASVGWAVVEIDKEENPLCLIDVGVRTFERAEVPKTGESLALSRRLARSARRLTQRRVARLKKAKRLLKLENILLSTDERLPHQVWQLRVEGLDRKLKRQEWAAVLLHLIKHRGYLSQRKNESKSENKELGALLSGVASNHELLQQTTYRTPAELAVKKFEVEEGHIRNQQGAYTHTFSRLDLLAEMELLFSRQQHFGNPFASEKLLENLTALLMWQKPALSGEAILKMLGKCTFEDEYKAAKNTYTAERFVWITKLNNLRIQENGLERALNDNERLILIEQPYEKAKLTYAQVRSILNLSDEAIFKGLRYSGEDKKAIETKTTLMEMKAYHQIRKVLEGNNLKAEWTELKENSTLLDEIGTAFSLYKTDEDISTYLAGKLSQPVLNALLENLSFDKFIQLSLKALYKLLPLMQQGLRYDEACHEMYGDHYGKKTYGKKTEENHYFLPQIPADEIRNPVVLRTLTQARKVINGVVRLYGSPARIHIETGREVGKSYKDRRELEKRQEENRKQRENAIKEFKEYFPHFAGEPKAKDILKMRLYKQQNAKCLYSGKPIELHRLLEKGYVEVDHALPFSRTWDDSFNNKVLVLANENQNKGNLTPFEWLDGKHNSERWRAFKALVETSAFPYAKNNAS

SEQ ID NO: 230 - protein, 1062 aa, Ralstonia syzygii
MAEKQHRWGLDIGTNSIGWAVIALIEGRPAGLVATGSRIFSDGRNPKDGSSLAVERRGPRQMRRRRDRYLRRRDRFMQALINVGLMPGDAAARKALVTENPYVLRQRGLDQALTLPEFGRALFHLNQRRGFQSNRKTDRATAKESGKVKNAIAAFRAGMGNARTVGEALARRLEDGRPVRARMVGQGKDEHYELYIAREWIAQEFDALWASQQRFHAEVLADAARDRLRAILLFQRKLLPVPVGKCFLEPNQPRVAAALPSAQRFRLMQELNHLRVMTLADKRERPLSFQERNDLLAQLVARPKCGFDMLRKIVFGANKEAYRFTIESERRKELKGCDTAAKLAKVNALGTRWQALSLDEQDRLVCLLLDGENDAVLADALREHYGLTDAQIDTLLGLSFEDGHMRLGRSALLRVLDALESGRDEQGLPLSYDKAVVAAGYPAHTADLENGERDALPYYGELLWRYTQDAPTAKNDAERKFGKIANPTVHIGLNQLRKLVNALIQRYGKPAQIVVELARNLKAGLEEKERIKKQQTANLERNERIRQKLQDAGVPDNRENRLRMRLFEELGQGNGLGTPCIYSGRQISLQRLFSNDVQVDHILPFSKTLDDSFANKVLAQHDANRYKGNRGPFEAFGANRDGYAWDDIRARAAVLPRNKRNRFAETAMQDWLHNETDFLARQLTDTAYLSRVARQYLTAICSKDDVYVSPGRLTAMLRAKWGLNRVLDGVMEEQGRPAVKNRDDHRHHAIDAVVIGATDRAMLQQVATLAARAREQDAERLIGDMPTPWPNFLEDVRAAVARCVVSHKPDHGPEGGLHNDTAYGIVAGPFEDGRYRVRHRVSLFDLKPGDLSNVRCDAPLQAELEPIFEQDDARAREVALTALAERYRQRKVWLEELMSVLPIRPRGEDGKTLPDSAPYKAYKGDSNYCYELFINERGRWDGELISTFRANQAAYRRFRNDPARFRRYTAGGRPLLMRLCINDYIAVGTAAERTIFRVVKMSENKITLAEHFEGGTLKQRDADKDDPFKYLTKSPGALRDLGARRIFVDLIGRVLDPGIKGD

SEQ ID NO: 231 - protein, 1052 aa, Haemophilus parainfluenzae
MENKNLHYILGLDLGIASVGWAVVEIDEKENPLRLIDVGVRTFERAETQKGESLALSRRSARSARRLTQRRVARLKKAKRLLKSENILLSTDERLPHQVWQLRVEGLDRKLERQEWAAVLLHLIKHRGYLSQRKNESKSENKELGALLSGVASNHELLQQATYRTPAELAVKKFEVEEGHIRNQQGAYTHTFSRLDLLAEMELLFSRQQHFGNPFASEKLLENLTALLMWQKPALSGEDILKMLGKCTFEDEYKAAKNTYTAERFVWITKLNNLRIQENGLERALSDNERLMLIEQPYEKAKLTYAQVRSILNLSDDAIFKGVRYSGEDKKAIETKTTLMEMKAYHQIRKVLEGNNLKAEWVALKANPTLLDEIGTAFSLYKTDEDISAYLAGKLSQPVLNALLENLSFDKFIQLSLKALYKLLPLMQQGLRYDEACREIYGDHYGKKTEETHHFLPQIPADEIRNPVVLRTLTQARKVINGVVRLYGSPARIHIETGREVGKSYKDRHELKKRQEENRKQREKTISEIKTLFPNFSGEPKGKDILKMRLYYQQNAKCLYSGKPLELHRLFEQKYVEVDHALPLSRTWDDSFNNKVLVLANENQNKGNLTPFEWLDGKNNSERWRTFKALVETSAFPYAKKQRILSQKLDEKGFIERNLNDTRYVARFLCNFIADNMHLTGEGKRKVFASNGQITALLRRRWGLAKSREDNDRHHALDAVLVACSTVAMQQKITRFVRFKAGDVFTGERIDRETGEIIPLHFPTPWQFFKQEVEIRIFSDNPKLELENRLPDRPQANHEFVQPLFVSRMPTRKMTGQGHMETVKSAKRLNEGISMIKMPLTKLKLKDLELMVNREREKDLYDALKTRLEAFNDDPAKAFAEPFMKKGGAIVKSVRVEQVQKSGVLVRQGNGVADNASMVRVDVFTKDGKYFLVPIYTWQVAKGILPNKAVIQGKDEEDWEDIDDATFQFSLHPNDLISVKTKKDEFLGYFNGLNRHTGGINIRTHDLEKSKGKQGIFEGIGVKIALSFEKYQIDELGKNIRLCKPSKRQPVR

SEQ ID NO: 232 - protein, 1331 aa, Lactobacillus sanfranciscensis
MNKQPYNIGLDIGTSSVGWSATELDNRLLHIKGHNGIGVRLFKEGESAADRRGFRTTRRRLARRKWRLRLLNEIFATEIAKVDPSFFARLKQSNVSPKDPNKTMFENILFDDENLDDQKFHHDYKTIYHLRQAIINHPEQKFDIRLIYLAMHHIIKYRGHFLNQANVQDFKGGKIDLEKSFKALNDIFENQGRDLRLVTDKANQYVKVLSDNAKTRSDRKKELSKLLYVPIDKDTDKNSKKVTGEILKAILGNKAKFDVIFGIEVENPKEWVLTFNSDDFDDKIEGLSSQMTDEDSEILLILKELYFALNLSDILNNSVTDKNAKTLSEAMINRYDDHKNQLAMLKKVIDSSDKKHAKELKEAYSAYIDGENNKKISFEDLKKRIQKNLVDSELSQKINDLLDHDYFLPKQRSKENGAIPHQLQQQELDQIIESQKQYYPFLAELNPNEKRSRQAKYKLDELVAFRVPYYVGPMVEVTDSNQENNGKFAWMIRKEQGEITPWNFDEKVDRTETATKFITRMTTTDTYLIGEPVLPKNSLLYQKFVVLNELNNLKINQEIITPGQKQYLYEHVMKKNKRVTLKKIADALVIKGDYPYAPEVKGTTDQKNLNNGLTTYIDLAKIFGNELDDVDREADFEKIIEWSTIFEDQHIFALKLQELKWLTEKQRNQVVKLRYQGWGKLSKELLAGLVDDNGQRIIDLLWSDNQNFMQIVNQKSFKESIADHNGAHLEEKNLKDVINDLYTSPQNKKAIRQVILVVDDIINAVGYEPANIMMEFAREDSNDHRLTNSRSRQLENVYKDITNSWFDNDSVKDELEDKIKNKDKFTDRLYLYFTQGGKDLYTGEPLNIDDLSSYDIDHILPQSFILDNSLDNRVLTSQRNNRVSKEDQLPGELFGTKMHAFWKRLKAAHLISNKKYYNLTLTPNSISKFNNQGRFINRQLVETRQVIKLAAEILHNRYSEEKGTNIVTIKANLTHHMREKFNFYKNRNVNDYHHAFDAYLTAFVGNWLLQQYPKLKPYFVYGDFAKTEINNLKSFNMLYKFEQAHQLNEKDGKIAKDADALLGYMKNVYHFKKMLVTKKLETNHGALFKQTLYPSPAHDIKKRQLIKPKDNRPTDIYGGYTHEERKYMSLVKVIGKKDNEYRMANVPLLKINKNNDIKEILKSQFSNKKFEIVLPKVLKNQLFSENGALFVIGSKGYKYNANQLVLSDLDMKLLNDLSNNKSIDEVTINQLFKNIVDSTNKYMPLYEIKNLNEVVEKFNNLEFNDKKKTITDFLLATHANPTMSNLKNIGLPSYFGRFTSGNAGIKLSENANVIYQSPTGLFSRKVKISDF

SEQ ID NO: 233 - protein, 1473 aa, Flavobacterium branchiophilum
MAKILGLDLGTNSIGWAVVERENIDFSLIDKGVRIFSEGVKSEKGIESSRAAERTGYRSARKIKYRRKLRKYETLKVLSLNRMCPLSIEEVEEWKKSGFKDYPLNPEFLKWLSTDEESNVNPYFFRDRASKHKVSLFELGRAFYHIAQRRGFLSNRLDQSAEGILEEHCPKIEAIVEDLISIDEISTNITDYFFETGILDSNEKNGYAKDLDEGDKKLVSLYKSLLAILKKNESDFENCKSEIIERLNKKDVLGKVKGKIKDISQAMLDGNYKTLGQYFYSLYSKEKIRNQYTSREEHYLSEFITICKVQGIDQINEEEKINEKKFDGLAKDLYKAIFFQRPLKSQKGLIGKCSFEKSKSRCAISHPDFEEYRMWTYLNTIKIGTQSDKKLRFLTQDEKLKLVPKFYRKNDFNFDVLAKELIEKGSSFGFYKSSKKNDFFYWFNYKPTDTVAACQVAASLKNAIGEDWKTKSFKYQTINSNKEQVSRTVDYKDLWHLLTVATSDVYLYEFAIDKLGLDEKNAKAFSKTKLKKDFASLSLSAINKILPYLKEGLLYSHAVFVANIENIVDENIWKDEKQRDYIKTQISEIIENYTLEKSRFEIINGLLKEYKSENEDGKRVYYSKEAEQSFENDLKKKLVLFYKSNEIENKEQQETIFNELLPIFIQQLKDYEFIKIQRLDQKVLIFLKGKNETGQIFCTEEKGTAEEKEKKIKNRLKKLYHPSDIEKFKKKIIKDEFGNEKIVLGSPLTPSIKNPMAMRALHQLRKVLNALILEGQIDEKTIIHIEMARELNDANKRKGIQDYQNDNKKFREDAIKEIKKLYFEDCKKEVEPTEDDILRYQLWMEQNRSEIYEEGKNISICDIIGSNPAYDIEHTIPRSRSQDNSQMNKTLCSQRFNREVKKQSMPIELNNHLEILPRIAHWKEEADNLTREIEIISRSIKAAATKEIKDKKIRRRHYLTLKRDYLQGKYDRFIWEEPKVGFKNSQIPDTGIITKYAQAYLKSYFKKVESVKGGMVAEFRKIWGIQESFIDENGMKHYKVKDRSKHTHHTIDAITIACMTKEKYDVLAHAWTLEDQQNKKEARSIIEASKPWKTFKEDLLKIEEEILVSHYTPDNVKKQAKKIVRVRGKKQFVAEVERDVNGKAVPKKAASGKTIYKLDGEGKKLPRLQQGDTIRGSLHQDSIYGAIKNPLNTDEIKYVIRKDLESIKGSDVESIVDEVVKEKIKEAIANKVLLLSSNAQQKNKLVGTVWMNEEKRIAINKVRIYANSVKNPLHIKEHSLLSKSKHVHKQKVYGQNDENYAMAIYELDGKRDFELINIFNLAKLIKQGQGFYPLHKKKEIKGKIVFVPIEKRNKRDVVLKRGQQVVFYDKEVENPKDISEIVDFKGRIYIIEGLSIQRIVRPSGKVDEYGVIMLRYFKEARKADDIKQDNFKPDGVFKLGENKPTRKMNHNQFTAFVEGIDFKVLPSGKFEKI

SEQ ID NO: 234 - protein, 933 aa, Mycoplasma iowae
SVRDYSDGPGSEKSPTPYGLWRLNKEGKVEKIGENLWDVLVGKCTIYGNDDSIKDEKTKLRGGKNSPIAEVFNFINDLTNIYLFSSSKLKLNSKTKLSILDEFNISLKTSKPIKSFSEKKLVKHIISTTEFKDINFDDVYGYRIDTSKKPLFTKLENTITIAKWLLDNNVYNELNIYDQEDLIKINNIFVILQKSMDINKRAQLVSDEYKIDLPICLELVKKIKGVMQTHSFSYKAMLEYIPVGIKYNDLETGEDTSINASTYFVDKINNLNTKLLFNGRPRKYIPKNIFEDGIISPTSKRAFIQTINVLNKIIKVYSKDYDIDNIAIELPRDKNTAEERKKISSNQKKAGEEIAEVLKFAGLNVEEYTSKLNSKTKLKLKLLKEQNYKDIYDGQEIDVIDVIKNSNKYHEEHIIPYSLCFIDSRRNKVLTKFENNKQKGNKTPFQWLSSIGKYAEFKDRVEKLFVEQKISKAKKELLLFEQDPRTEMLGFIEKNLSDTRYASKLVFDTFRDFFKVNNPNVKIKVINGALTNYARYNLFATYKDGLLERKGIMKQREFYEHHGIDATILAFLGSNHKINQLLKLSHKFKKQDDNKIYDENTGELIEFTKDFLSDEARKKAMELSKQIFEIPCKFSRPIYRKSNVSFSNETLISMKWIDDKYTKGVKINKLSLVNKDLDLNEYFADYETNEMKNLICYQEDKTLYNKLKNIYDKYNNFVENSNIKPVKNPFINYMISNFSSDDSKIQNFKHIIFYDHKGNKKFVKSLKVCGDEKNLSNIVLRKDQKDIMNSKKIKKSGILESLNPISARIYKDNKGKYITIPINSLVLNWTKKGLEIDNEKLCNILKSKNIFNNQFIEINAGQSIINNENKLFYFVGGGDFKVNKLEIKSQFCDNEIFFPRKQMNISIATIIDNYKLCEVDELGKIYNIRKIVL

SEQ ID NO: 235 - protein, 1358 aa, Acidaminococcus intestini; identical to SEQ ID NO: 99

SEQ ID NO: 236 - protein, 983 aa, Campylobacter jejuni
MARILAFDIGISSIGWAFSENDELKDCGVRIFTKAENPKTGESLALPRRLARSARKRLARRKARLNHLKHLIANEFKLNYEDYQSFDESLAKAYKGSLISPYELRFRALNELLSKQDFARVILHIAKRRGYDDIKNSDDKEKGAILKAIKQNEEKLANYQSVGEYLYKEYFQKFKENSKEFTNVRNKKESYERCIAQSFLKDELKLIFKKQREFGFSFSKKFEEEVLSVAFYKRALKDFSHLVGNCSFFTDEKRAPKNSPLAFMFVALTRIINLLNNLKNTEGILYTKDDLNALLNEVLKNGTLTYKQTKKLLGLSDDYEFKGEKGTYFIEFKKYKEFIKALGEHNLSQDDLNEIAKDITLIKDEIKLKKALAKYDLNQNQIDSLSKLEFKDHLNISFKALKLVTPLMLEGKKYDEACNELNLKVAINEDKKDFLPAFNETYYKDEVTNPVVLRAIKEYRKVLNALLKKYGKVHKINIELAREVGKNHSQRAKIEKEQNENYKAKKDAELECEKLGLKINSKNILKLRLFKEQKEFCAYSGEKIKISDLQDEKMLEIDHIYPYSRSFDDSYMNKVLVFTKQNQEKLNQTPFEAFGNDSAKWQKIEVLAKNLPTKKQKRILDKNYKDKEQKNFKDRNLNDTRYIARLVLNYTKDYLDFLPLSDDENTKLNDTQKGSKVHVEAKSGMLTSALRHTWGFSAKDRNNHLHHAIDAVIIAYANNSIVKAFSDFKKEQESNSAELYAKKISELDYKNKRKFFEPFSGFRQKVLDKIDEIFVSKPERKKPSGALHEETFRKEEFYQSYGGKEGVLKALELGKIRKVNGKIVKNGDMFRVDIFKHKKTNKFYAVPIYTMDFALKVLPNKAVARSKKGEIKDWILMDENYEFCFSLYKDSLILIQTKDMQEPEFVYYNAFTSSTVSLIVSKHDNKFETLSKNQKILFKNANEKEVIAKSIGIQNLKVFEKYIVSALGEVTKAEFRQREDFKK

SEQ ID NO: 237 - protein, 1338 aa, Streptococcus macacae
MTKPYSIGLDIGTNSVGWAVVTDGYKVPAKKMKVLGNTDKSHIKKNLLGALLFDSGNTAKDRRLKRTARRRYTRRRNRILYLQEIFAEEMAKADESFFQRLNESFLTNDDKEFDSHPIFGNKAEEEAHHHKFPTIFHLRKHLADSTEKSDLRLIYLALAHMIKFRGHFLIEGQLKAENTNVQTLFDDFVEVYDKTVEESHLSEISVSSILTEKISKSRRLENLIKYYPTEKKNTLFGNLIALSLGLQPNFKTNFKLSEDAKLQFSKDTYEEDLGELLGKIGDNYADLFISAKNLYDAILLSGILTIDDNTTKAPLSASMIKRYEEHQEDLAQLKKFIRQNLPDQYSEVFSDKTKDGYAGYIDGKTNQEAFYKYIKNMLSKTEGADYFLDKIDREDFLRKQRTFDNGSVPHQIHLQEMHAILRRQGEYYPFLKENQDKIEKILTFRIPYYVGPLARKGSRFAWAEYKADKKVTPWNFDDILDKEKSAEEFITRMTLNDLYLPEEKVLPKHSLVYETFNVYNELTKVKYVNEQGKAIFFDANMKQEIFDHVFKENRKVTKDKLLNYLNKEFEEFRIVNLTGLDKENKAFNSSLGTYHDLRKILDKSFLDDKVNEKIIEDIIQTLTLFEDREMIRQRLQKYSDIFTTQQLKKLERRHYTGWGRLSAKLINGIRDKQSNKTILGYLIDDGYSNRNFMQLINDDSLPFKEEIARAQVIGETDDLNQLVSDIAGSPAIKKGILQSLKIVDELVKVMGHNPANIVIEMARENQTTAKGRRSSQQRYKRLEEAIKNLDHDLNHKILKEHPTDNQALQNDRLFLYYLQNGRDMYTEDPLDINRLSDYDIDHIIPQSFIKDDSIDNKVLVSSAKNRGKSDNVPSEDVVNRMRPFWNKLLSCGLISQRKYSNLTKKELKPDDKAGFIKRQLVETRQITKHVAQILDARFNTKRDENKKVIRDVKIITLKSNLVSQFRKDFKFYKVREINDYHHAHDAYLNAVIGKALLDVYPQLEPEFVYGEYPHFHGYKENKATAKKFFYSNIMNFFKKDDIRTDENGEIVWKKDEHISNIKRVLSYPQVNIVKKVEIQTVGQNGGLFDDNPKSPLEVTPSKLVPLKKELNPKKYGGYQKPTTAYPVLLITDTKQLIPISVMNKKQFEQNPVKFLRDRGYQQVGKNDFIKLPKYTLVDIGDGIKRLWASSKEIHKGNQLVVSKKSQILLYHAHHLDSDLSNDYLQNHNQQFDVLFNEIISFSKKCKLGKEHIQKIENVYSNKKNSASIEELAESFIKLLGFTQLGATSPFNFLGVKLNQKQYKGKKDYILPCTEGTLIRQSITGLYETRVDLSKIGED

SEQ ID NO: 238 - protein, 1265 aa, Mycoplasma ovipneumoniae
MHNKKNITIGFDLGIASIGWAIIDSTTSKILDWGTRTFEERKTANERRAFRSTRRNIRRKAYRNQRFINLILKYKDLFELKNISDIQRANKKDTENYEKIISFFTEIYKKCAAKHSNILEVKVKALDSKIEKLDLIWILHDYLENRGFFYDLEEENVADKYEGIEHPSILLYDFFKKNGFFKSNSSIPKDLGGYSFSNLQWVNEIKKLFEVQEINPEFSEKFLNLFTSVRDYAKGPGSEHSASEYGIFQKDEKGKVFKKYDNIWDKTIGKCSFFVEENRSPVNYPSYEIFNLLNQLINLSTDLKTTNKKIWQLSSNDRNELLDELLKVKEKAKIISISLKKNEIKKIILKDFGFEKSDIDDQDTIEGRKIIKEEPTTKLEVTKHLLATIYSHSSDSNWININNILEFLPYLDAICIILDREKSRGQDEVLKKLTEKNIFEVLKIDREKQLDFVKSIFSNTKFNFKKIGNFSLKAIREFLPKMFEQNKNSEYLKWKDEEIRRKWEEQKSKLGKTDKKTKYLNPRIFQDEIISPGTKNTFEQAVLVLNQIIKKYSKENIIDAIIIESPREKNDKKTIEEIKKRNKKGKGKTLEKLFQILNLENKGYKLSDLETKPAKLLDRLRFYHQQDGIDLYTLDKINIDQLINGSQKYEIEHIIPYSMSYDNSQANKILTEKAENLKKGKLIASEYIKRNGDEFYNKYYEKAKELFINKYKKNKKLDSYVDLDEDSAKNRFRFLTLQDYDEFQVEFLARNLNDTRYSTKLFYHALVEHFENNEFFTYIDENSSKHKVKISTIKGHVTKYFRAKPVQKNNGPNENLNNNKPEKIEKNRENNEHHAVDAAIVAIIGNKNPQIANLLTLADNKTDKKFLLHDENYKENIETGELVKIPKFEVDKLAKVEDLKKIIQEKYEEAKKHTAIKFSRKTRTILNGGLSDETLYGFKYDEKEDKYFKIIKKKLVTSKNEELKKYFENPFGKKADGKSEYTVLMAQSHLSEFNKLKEIFEKYNGFSNKTGNAFVEYMNDLALKEPTLKAEIESAKSVEKLLYYNFKPSDQFTYHDNINNKSFKRFYKNIRIIEYKSIPIKFKILSKHDGGKSFKDTLFSLYSLVYKVYENGKESYKSIPVTSQMRNFGIDEFDFLDENLYNKEKLDIYKSDFAKPIPVNCKPVFVLKKGSILKKKSLDIDDFKETKETEEGNYYFISTISKRFNRDTAYGLKPLKLSVVKPVAEPSTNPIFKEYIPIHLDELGNEYPVKIKEHTDDEKLMCTIK

SEQ ID NO: 239 - protein, 1535 aa, Flavobacterium columnare
MTKILGLDLGTNSIGWAIRDTENEGINQILDKGARIFSEGVKSENGKEISRAAERTAYRSARKIKYRRKLRKYETLKVLSINGMCPLSVEEVEQWKKSGFKEYPLNPEFLDWLRTNEDKNINPYLFRDKASKQKVTLFELGRALYHIAQRRGFLSNRLDQSAEGVFEEHNPQIQNLIEDLDSSNTILNELKEYYINLGIIDETEKSGFKKDLDEGEKKLKSLYNSLVAITKKNANDIETCKQELIARLNKKEDLGKVKGKIKDISQAMLDRNFKTLGQYFFSLYNKERIRNQYTSREEHYLEEFIIICQTQGIEGINTNEKLPEKKFTGLAKDLYRAIFFQRPLKSQKGLIGKCSFEKNKSRCAVSHPDYEEFRMWSYLNTIKIGTQSEKTLRFLTLEEKLKLVPKFYRKSDFNFEVLAKELVEKGASFGYYKSSKKNEFFYWFNYKPTDSVSACVVSASLENAIGKDWKIKTFEYQTRNTEKNEVTKSVDYKDLWHLLSVATSDTYLYDFAIEKLKLEPKNAKAFSKTKLKKDFASLSLAAIAKILPYLKQGLLYSHAVFMANIENIVDADIWKDEEQQKFIQSKIVELVDNYIVEKSKLELINGLLKIYNTEDKEGRKVYYSKEAESLFEADLRKKLVPFYKANIIIEEHEQEIIFQDLFPILMDQLKKQEFIKIGRLDKQIEAFLEGENEEGQIFCNHTDKLKKLYHPSDIEVFKKKTIKDEWGNEKVVLGSPLTTSIKNPMAMRALHQLRKVLNTLIANDQIDEDTRIHIEMARELNDANKRKGIQDFQNENKKFREEAIKEIKKLYLEECHKDVNPTEDDILRYQLWLEQGKCEIYEEGNNISICDIIGSNPSYDIEHTIPRSISQDNSQMNKTLCSLKFNRSIKKQKMPVELSNYNDILPRIAHWKKEAEELTRQIETISRSIKSAATKVAKDKNIRKRHYLTLKRDYILGKYERFTWEEPKVGFKNSQIPDTGIITKYAQAYLKSYFKRVESVKGGAVAEFRKLWGIQESFIDENWWKHYKDKDRDKHTHHTIDAITIACMPKDKYDLLAHAWRLEDEQDKKAAKVLIEQAKPWKTFKEDIEKIETEILVSHFTPDNVKKQSKSIIKNRGKKVYVLKNELPVNFKNKIEGKDYFKLKFDSKILYKIPKKKEKQTDTFYEELPKNYLNGVEGKDYFKINTTGKTFYKIPIFNQGDTIRGSLHQETTYGAIKLPDIDIETKKPLHTDKGGFILKKDIKGNEIVFFVVRKEISKISENDVQNIVDNVVRKKIENAIANSLITFKIVKKKKVAVIKEGVTIWMREPNIEKGIEGIPIKKVRIITNSVKNPIEIKVHSPLSKSRHKHKQKVYGQNDENYAMALYELDGKREFELINNFNLAKLLKQSQSYYPLHKEKEIKGKKILVPIEKRNNKDVILKRGQQVVFYDKTVENPKDISEIIDFRERIYIIEGLTIQRQKDKKTSKVNEYGIIQLRHFKEARKSEEISKDNFKPDGEFKINENKPTRKMNHNQFTAFVEGIDFKVLPSGKFQKI

SEQ ID NO: 240 - protein, 1459 aa, Flavobacterium columnare
MKFNLGLDIGTNSIGWALVNEDYENKKGKIIAAGSRIIPMTQDILDKFGSGAITETQTALRTDYRSKRKLIQRFLLRRERLHRVLNVLDFLPKHYAESIDFEKYFGKFLPNTEPKLAYNQNQFIFQNSFLEMLKEFQEKHPELLTNNKKIPYDWTIYYLRKKALNQRIEKEELAWLLLQFNQKRGYNQLRDEEEESVPNKQVEFYSLKIIDVVADQPKEGRDKRWYSINLENGWTYRRESKTPLFNWEGKTKDFIVTTDLNQDGSIKKDKEGKEKRSFRAPSEGDWTLLKKKTEKEIYESGKTLGTYIYDALLNTPDLKIKGDFIRTIDRSIYKEELQQIINKQKEYHLELNSSKLYKACLEELYPKNEIYKSALKNKDIAYLFINDILYYQRPLKAPKYNIGKCTYESRTFKKEDKKIREYIPAVAKSHPLFQEFRLWQWIKNLKIYEKLSSDNCTDFFLTNEQDFENLFEFLWNKKEIDHKGILEYLVKTKFPDLKPKQVKTKVKEYRWNYVYDHEKDESKTYPCGETYFLLKNKLDKIYNAQDDFLDKERLYNLWHIIYSVTDKKQYEKALAKFALKNHLDTKSFVNTFKRIPPFKNDYAIYSLKAIKKLLPLMRVGKYWNYDDIDPITKQKIQCIITGEENDTISTLVREKTNHFSNENDFKNLPLWLAGYIVYNSHNESSEIEKWKSPQDIDTFLKKFKQHALRNPIVEQVVTETLRVVRDIWSKKGQGKKDFFNEIHIELGKDLKNPVDKRRKLSSTNTKNESTNTRIKALLIELFTQGVENVKPNSPKHQEILKIFEEGALNSGIEIEEDIIKISNTDQPTKKQLELYILWLEHKYKSPYTGQSIPLSKLFTPNYEIEHIIPRSKYYDDNLSNKVICETEINRLKNNQLGYEFINNHEIREVTLEEGKTIRLLSPEQYWNFVTTYYAKNKAKRENLLLKELPVQMVEKQLNDTRYVSKYVMQLLSKIVRKEDGTDNGINSTNILSISGKMTRALKNDWDLNDVWNDLLLYRFERLNTITKTNLFTTYSEQKQKRMPIVPDQYAKGFHKKRLDHRHHALDAIVIACITRNHINYMNNQNIQGEKLKKNAIEKENYREILQKSRLDIRAQLCEKKYNDNDPTKYNWVFIKPWADFTENTKDILESIIPSFKQNLRIINKTVNYYEKYNENGKKVKVRQIKGDNWAIRKPLHKETISGKVHLSYKTPAKGKILTATRKVLDSSMDFKSIEKITDTGIQKILKNYLEYKKSPELAFSPEGIEELNATITKYNNGFHHKPIYKVRIYEEGVKFPLGNKGNKKSKYVEAEKGTNLFFAIYKDQENNRYFETIPFNDVLETLKKGMSAVPEKNQEENTLVFALSPQDLVFVPTLDEIENPDIVDFKNLTKDQTNRIYKMVSSSGKQCFFIKAEVATSIVNKMEFSTSNKMENSIEGIQIKSNCWKLKLDRLGTITRVIK

SEQ ID NO: 241 - protein, 1389 aa, Oenococcus kitaharae
MARDYSVGLDIGTSSVGWAAIDNKYHLIRAKSKNLIGVRLFDSAVTAEKRRGYRTTRRRLSRRHWRLRLLNDIFAGPLTDFGDENFLARLKYSWVHPQDQSNQAHFAAGLLFDSKEQDKDFYRKYPTIYHLRLALMNDDQKHDLREVYLAIHHLVKYRGHFLIEGDVKADSAFDVHTFADAIQRYAESNNSDENLLGKIDEKKLSAALTDKHGSKSQRAETAETAFDILDLQSKKQIQAILKSVVGNQANLMAIFGLDSSAISKDEQKNYKFSFDDADIDEKIADSEALLSDTEFEFLCDLKAAFDGLTLKMLLGDDKTVSAAMVRRFNEHQKDWEYIKSHIRNAKNAGNGLYEKSKKFDGINAAYLALQSDNEDDRKKAKKIFQDEISSADIPDDVKADFLKKIDDDQFLPIQRTKNNGTIPHQLHRNELEQIIEKQGIYYPFLKDTYQENSHELNKITALINFRVPYYVGPLVEEEQKIADDGKNIPDPTNHWMVRKSNDTITPWNLSQVVDLDKSGRRFIERLTGTDTYLIGEPTLPKNSLLYQKFDVLQELNNIRVSGRRLDIRAKQDAFEHLFKVQKTVSATNLKDFLVQAGYISEDTQIEGLADVNGKNFNNALTTYNYLVSVLGREFVENPSNEELLEEITELQTVFEDKKVLRRQLDQLDGLSDHNREKLSRKHYTGWGRISKKLLTTKIVQNADKIDNQTFDVPRMNQSIIDTLYNTKMNLMEIINNAEDDFGVRAWIDKQNTTDGDEQDVYSLIDELAGPKEIKRGIVQSFRILDDITKAVGYAPKRVYLEFARKTQESHLTNSRKNQLSTLLKNAGLSELVTQVSQYDAAALQNDRLYLYFLQQGKDMYSGEKLNLDNLSNYDIDHIIPQAYTKDNSLDNRVLVSNITNRRKSDSSNYLPALIDKMRPFWSVLSKQGLLSKHKFANLTRTRDFDDMEKERFIARSLVETRQIIKNVASLIDSHFGGETKAVAIRSSLTADMRRYVDIPKNRDINDYHHAFDALLFSTVGQYTENSGLMKKGQLSDSAGNQYNRYIKEWIHAARLNAQSQRVNPFGFVVGSMRNAAPGKLNPETGEITPEENADWSIADLDYLHKVMNFRKITVTRRLKDQKGQLYDESRYPSVLHDAKSKASINFDKHKPVDLYGGFSSAKPAYAALIKFKNKFRLVNVLRQWTYSDKNSEDYILEQIRGKYPKAEMVLSHIPYGQLVKKDGALVTISSATELHNFEQLWLPLADYKLINTLLKTKEDNLVDILHNRLDLPEMTIESAFYKAFDSILSFAFNRYALHQNALVKLQAHRDDFNALNYEDKQQTLERILDALHASPASSDLKKINLSSGFGRLFSPSHFTLADTDEFIFQSVTGLFSTQKTVAQLYQETK

SEQ ID NO: 242 - protein, 1425 aa, Prevotella micans
MIQKIFGLDLGTNSIGSSVRNLELGENLTEQLEFFSSDIFGSSVSKNSNGREYSLAGNRSAHRRSRGLNEARRRKLWATLDLLIEHGLCPMSPDSLMQWRTYDKQKGLYRQYPIEDKDFNAWIMLDFNGDGKPDYSSPYQLRRELVVRQFDFDQPIERYKLGRALYHIAQHRGFKSSKGETIADQEKNEKKPIAEEGADIANEMKASETKLSKGLVAYMQENHLKTVGEAFAKLEDERVRIRNNESYRAIRSQYQDEIKEIFTYQKKLSVESELYERLTSEKKGVGTIFYKRPLRSQRGNVGKCTLERNKPRCPIGRPEFEEFRAWTLINNIKIRETAGEPYKQLPIKLRQELLKDCFLSKVKADFKFEDIRKYIEKRLGLSFSNDDKTINYKDSVSIAACPVTVRMKKLLGENWANCRIDGEKRRQAHGKNNNNEHIVSYTEEDIWHVCYNAEDPEEVSNFARKALHWDENKIKELVRLWTSIPQGYAMLSLKAIRNINRMLLLGLKYSDAVLLAKLPDIVPVSDEDILAITKEFLQLEDKLNQEKQINNIVNSLIANYKSKLEENRFADHNYQYQLGEGDDEDINTQIKSHIGAKLWVQIGADEQTKIFQAVRSKYQDFFKSYKRKFVESPKLGELLVAFLTEKFPNVKSKQWERLYHPSQIAIYRPIPVDNDRSKLRLGNPNIGAIKNPTVMRVLNTLRRRVNQLLDDGVISPDETRVVVETARELNDANTKWALDRYNRIRRDENEKIRKILKELNPTTNSISEQDIDKARYIFEQCETDFYTDGKVPYYNKDIKKYKLWLEQGGQCLYTGQTINLTNLFNPNAFDMEHTIPKSISFDNSDQNLTLCESYYNRFIKKNNIPTDMPNYDKDVTINGKEYTAIKPRLQRWKERVDRLSRNVDFWKGQARRAQDKDRKDECIREKHLWDMELAYWKGKLERFTMTDVTDGFKNSQLVDTRVITRHAVLYLKSIFNHVEVQRGETTAEFRKILGLQSIDEKKDRSLHSHHAIDATMLTVIPSAAKRDRMLELFYKIEETKKALKNYNDNNKTGLNLELKGLEEKLDKEKKDCRVGRRVNDLDRFINENIIVSHHTKDQALTPAHRRLRKRGKIVGGKEHPRWQTGDSLRGEIHKASYYGAITQFAKDANGKVLMKDGQAQIDPTIYYVIRRELKYKRSTQDSGFTNWEDLEKVIVDTDLFGLMKGQFPEGTSFKDACEQGFYMIKKGKNGEGDVKTHRIRHVRCKAVKTALRIKEQTYKSSKDYKQFFYAAVGDLYVMCYYTDGKKRDFKIYSLYDISNHRKSGTEDIPKFITDKKGNHLPLDYKLRTGDMVLLYKDNPEELKDLDQVNLKRRLYKVNRFESEGLIILLTHHLSTTTERGCSIGKIENYQNLPTAIRCGIKTIKFLIMGKHRDFVIRNGNIEFKH

SEQ ID NO: 243 - protein, 1473 aa, Mucilaginibacter paludis
MKNILGLDLGTNSIGWALIEKDTDQKNGNILGTGSRIIPMSQDIKDEFGKGNSISQTADRTKFRSVRRLRERHLLRRERLHRVLNVLGFLPKHYADQIDFKKRLGKLVNETEPKLVYDNKNFIFKKSFEAMLSDFNQHQPLLLADGKKVPFDWTIYYLRKKALTEKIEKEELAWLILNFNQKRGYYQLRGEEEEENPNKMVAFHSLKIVEVIADESQKGKAETWYSLILENGWIYRRSSKTPLYDWKGKQRDFIVTTDLNDDGSIKTDKEGLEKRSFRAPVEDDWTLVKKKTEQEINRSHKTVGTYIYENLLQDPKQKIKGKLVRTIEREFYKDELKMILKNQQKFHPELNDEHLYINCVRELYRNNQAHQTILSKKDFVHLFIDDIIFYQRPLRSQKSSISNCTLEFRKYKNENGTDQTDYLKAIPKSHPLFQEFRLWQWIYNLGIYQKEDDTNVTDELIKNIDGYQDLFDFLNNKKEIRQDILIKFLVEQTGLKGKPLSSVVAKYRWNFVEDKIYPCNETGTQIRTRLAKVENTPEDFLTAETEIKLWHIIYSVNDKADYEKALKTFAEKHNLDTHSFVENFKKFPPFKSEYGSFSEKAIKKLLPLIRLGKYWSWENIDKKTQERIEKILTGEFDEAIKSRVRDKAIHLTEEDHFQGLQLWLASYVVYGRHSEADNLDKWHTVADLEDYLAEFRQHSLRNPIVEQVITETLRVVKDIWLQYGQGAKDFFSEIHIELAREMKNTGDERKRLTSLVTDNENTNLRIKVLLSELLNDGNVENVRPYSPMQQEALKIFEDGVLNSDIEIEDDILKISKMAQPTNTELKRYKLWLEQKYRSPYTGQIIPLNRLFTADYEIEHIIPQSRFFDDSFSNKIICESAVNQLKDKQLGLEFIKNHSGTIVKLGMGKTAKILDVESYNEFVKGNYTKNISKRNKLMLEEIPDKMIERQLNDTRYISKFIISALSNIVRSESNDDGFNSKNVLPGNGKITSRLKQDWGMNDIWNELILPRFERMNKITDSAVFTAWNENNQKFLPIVPLEFSKGFQKKRIDHRHHALDALVIAASTREHINLLNNEHAKSDKRFDLNRKLRKFEKVAYNDPKTGKRIEKEVPTIFLKPWETFTVDAKNSLESIIVSFKQNLRVINRATNYSESYNDENGALRLGKDGNPLKEKIKQSKGDSWAIRKPMHKDFVYGKVHLQNVKLPKDKFITAIRKSLDVTFDLKRIETITDTGIQKILKNYLHSKENKVELAFSPEGIEDMNQHIERYNDGKKHQPIHKVRVFEIGSRFSLGESGNKKTKFVEAAKGTNLFFAVYQDDNKGKRNYETIPLNIVIERQKLGLHSVPTEDAKGGKLLFHLSPNDMVYVPTSEELEDNLASVNIKRLNTAQRKRIYKVEKASGVECYFIRQDIAYLIKNYDAKTKIGELESQNKLQTTMTDDRLKITDVCVKLNIDRLGSIAETFLGNQYGASKKT

SEQ ID NO: 244 - protein, 1365 aa, Filifactor alocis
MTKEYYLGLDVGTNSVGWAVTDSQYNLCKFKKKDMWGIRLFESANTAKDRRLQRGNRRRLERKKQRIDLLQEIFSPEICKIDPTFFIRLNESRLHLEDKSNDFKYPLFIEKDYSDIEYYKEFPTIFHLRKHLIESEEKQDIRLIYLALHNIIKTRGHFLIDGDLQSAKQLRPILDTFLLSLQEEQNLSVSLSENQKDEYEEILKNRSIAKSEKVKKLKNLFEISDELEKEEKKAQSAVIENFCKFIVGNKGDVCKFLRVSKEELEIDSFSFSEGKYEDDIVKNLEEKVPEKVYLFEQMKAMYDWNILVDILETEEYISFAKVKQYEKHKTNLRLLRDIILKYCTKDEYNRMFNDEKEAGSYTAYVGKLKKNNKKYWIEKKRNPEEFYKSLGKLLDKIEPLKEDLEVLTMMIEECKNHTLLPIQKNKDNGVIPHQVHEVELKKILENAKKYYSFLTETDKDGYSVVQKIESIFRFRIPYYVGPLSTRHQEKGSNVWMVRKPGREDRIYPWNMEEIIDFEKSNENFITRMTNKCTYLIGEDVLPKHSLLYSKYMVLNELNNVKVRGKKLPTSLKQKVFEDLFENKSKVTGKNLLEYLQIQDKDIQIDDLSGFDKDFKTSLKSYLDFKKQIFGEEIEKESIQNMIEDIIKWITIYGNDKEMLKRVIRANYSNQLTEEQMKKITGFQYSGWGNFSKMFLKGISGSDVSTGETFDIITAMWETDNNLMQILSKKFTFMDNVEDFNSGKVGKIDKITYDSTVKEMFLSPENKRAVWQTIQVAEEIKKVMGCEPKKIFIEMARGGEKVKKRTKSRKAQLLELYAACEEDCRELIKEIEDRDERDFNSMKLFLYYTQFGKCMYSGDDIDINELIRGNSKWDRDHIYPQSKIKDDSIDNLVLVNKTYNAKKSNELLSEDIQKKMHSFWLSLLNKKLITKSKYDRLTRKGDFTDEELSGFIARQLVETRQSTKAIADIFKQIYSSEVVYVKSSLVSDFRKKPLNYLKSRRVNDYHHAKDAYLNIVVGNVYNKKFTSNPIQWMKKNRDTNYSLNKVFEHDVVINGEVIWEKCTYHEDTNTYDGGTLDRIRKIVERDNILYTEYAYCEKGELFNATIQNKNGNSTVSLKKGLDVKKYGGYFSANTSYFSLIEFEDKKGDRARHIIGVPIYIANMLEHSPSAFLEYCEQKGYQNVRILVEKIKKNSLLIINGYPLRIRGENEVDTSFKRAIQLKLDQKNYELVRNIEKFLEKYVEKKGNYPIDENRDHITHEKMNQLYEVLLSKMKKFNKKGMADPSDRIEKSKPKFIKLEDLIDKINVINKMLNLLRCDNDTKADLSLIELPKNAGSFVVKKNTIGKSKIILVNQSVTGLYENRREL

SEQ ID NO: 245 - protein, 1130 aa, Streptococcus macedonicus
MTNGKILGLDIGIASVGVGIIEAKTGKVVHANSRLFSAANAENNAERRGFRGSRRLNRRKKHRVKRVRDLFEKYGIVTDFRNLNLNPYELRVKGLTEQLTNEELFAALRTISKRRGISYLDDAEDDSTGSTDYAKSIDENRRLLKTKTPGQIQLERLEKYGQLRGNFTVYDENGEAHRLINVFSTSDYEKEARKILETQADYNKKITAEFIDDYVEILTQKRKYYHGPGNEKSRTDYGRFRTDGTTLENIFGILIGKCNFYPDEYRASKASYTAQEYNFLNDLNNLKVPTETGKLSTEQKESLVEFAKNTAILGPAKLLKEIAKILDCKVDEIKGYREDDKGKPDLHTFEPYRKLKFNLDSVNIDYLSREVLDKLADILTLNTEREGIEDAIKRNLPNQFTEEQISEIINVRKSQSTAFNKGWHSFSAKLMNELIPELYATSDEQMTILTRLEKFKVKKKSSKNIKTIDEKEITDEIYNPVVAKSVRQTIKIINAAVKKYGDFDKIVIEMPRDKNADDEKKFINKRNKENKKEKDDALKRAAYLYNGTDKLPDEVFHGNKQLETKIRLWYQQGERCLYSGKPIPIQELVHNSNNFEIDHILPLSLSFDDSLANKVLVYSWTNQEKGQKTPYQVIDSMDAAWSFREMKEYVLKQKGLGKKKRDYLLTTENIDKIEVKKKFIERNLVDTRYASRVVLNSLQSALRELGKDTKVSVVRGQFTSQLRRKWKIDKSRETYHHHAVDALIIAASSQLKLWEKQDNPMFVDYGNNQVVDKQTGEILSVSDNEYKELVFQPPYQGFVNTISSKGFEDEILFSYQVDSKYNRKVSDATIYSTRKAKIGKDKKEETYVLGKIKDIYSQNGFDTFVKKYNKDKTQFLMYQKDPLTWENVIEVILGDYPTTKKSEDGKNDVKCNPFEEYRRENGLICKYSKKGKGTPIKSLKYYDKKLGNCIDITPEESRNKVILQSINPWRADVYFNPETLKYELMGLKYSDLSFEKGTGNYHISQEKYDAIKEKEGIGKKSEFKFTLYRNDLILIKDIASGEQEIYRFLSRTMPNVNHYVELKPYDKEKFDNVQELVEALGEADKVGRCIKSLNKPNISIYKVRTDVLGNKYFVKKEGDKPKLDFKNNKK

SEQ ID NO: 246 - protein, 1367 aa, Streptococcus pyogenes
MDKKYSIGLDIGTNSVGWAVITDDYKVPSKKFKVLGNTDRHSIKKNLIGALLFGSGETAEATRLKRTARRRYTRRKNRICYLQEIFSNEMAKVDDSFFHRLEESFLVEEDKKHERHPIFGNIVDEVAYHEKYPTIYHLRKKLADSTDKADLRLIYLALAHMIKFRGHFLIEGDLNPDNSDVDKLFIQLVQIYNQLFEENPINASRVDAKAILSARLSKSRRLENLIAQLPGEKRNGLFGNLIALSLGLTPNFKSNFDLAEDAKLQLSKDTYDDDLDNLLAQIGDQYADLFLAAKNLSDAILLSDILRVNSEITKAPLSASMIKRYDEHHQDLTLLKALVRQQLPEKYKEIFFDQSKNGYAGYIDGGASQEEFYKFIKPILEKMDGTEELLVKLNREDLLRKQRTFDNGSIPHQIHLGELHAILRRQEDFYPFLKDNREKIEKILTFRIPYYVGPLARGNSRFAWMTRKSEETITPWNFEEVVDKGASAQSFIERMTNFDKNLPNEKVLPKHSLLYEYFTVYNELTKVKYVTEGMRKPAFLSGEQKKAIVDLLFKTNRKVTVKQLKEDYFKKIECFDSVEISGVEDRFNASLGAYHDLLKIIKDKDFLDNEENEDILEDIVLTLTLFEDRGMIEERLKTYAHLFDDKVMKQLKRRRYTGWGRLSRKLINGIRDKQSGKTILDFLKSDGFANRNFMQLIHDDSLTFKEDIQKAQVSGQGHSLHEQIANLAGSPAIKKGILQTVKIVDELVKVMGHKPENIVIEMARENQTTQKGQKNSRERMKRIEEGIKELGSQILKEHPVENTQLQNEKLYLYYLQNGRDMYVDQELDINRLSDYDVDHIVPQSFIKDDSIDNKVLTRSDKNRGKSDNVPSEEVVKKMKNYWRQLLNAKLITQRKFDNLTKAERGGLSELDKAGFIKRQLVETRQITKHVAQILDSRMNTKYDENDKLIREVKVITLKSKLVSDFRKDFQFYKVREINNYHHAHDAYLNAVVGTALIKKYPKLESEFVYGDYKVYDVRKMIAKSEQEIGKATAKYFFYSNIMNFFKTEITLANGEIRKRPLIETNGETGEIVWDKGRDFATVRKVLSMPQVNIVKKTEVQTGGFSKESILPKRNSDKLIARKKDWDPKKYGGFDSPTVAYSVLVVAKVEKGKSKKLKSVKELLGITIMERSSFEKNPIDFLEAKGYKEVKKDLIIKLPKYSLFELENGRKRMLASAGELQKGNELALPSKYVNFLYLASHYEKLKGSPEDNEQKQLFVEQHKHYLDEIIEQISEFSKRVILADANLDKVLSAYNKHRDKPIREQAENIIHLFTLTNLGAPAAFKYFDTTIDRKRYTSTKEVLDATLIHQSITGLYETRIDLSQLGGD

SEQ ID NO: 247 - protein, 1233 aa, Mycoplasma canis
MEKKRKVTLGFDLGIASVGWAIVDSETNQVYKLGSRLFDAPDTNLERRTQRGTRRLLRRRKYRNQKFYNLVKRTEVFGLSSREAIENRFRELSIKYPNIIELKTKALSQEVCPDEIAWILHDYLKNRGYFYDEKETKEDFDQQTVESMPSYKLNEFYKKYGYFKGALSQPTESEMKDNKDLKEAFFFDFSNKEWLKEINYFFNVQKNILSETFIEEFKKIFSFTRDISKGPGSDNMPSPYGIFGEFGDNGQGGRYEHIWDKNIGKCSIFTNEQRAPKYLPSALIFNFLNELANIRLYSTDKKNIQPLWKLSSVDKLNILLNLFNLPISEKKKKLTSTNINDIVKKESIKSIMISVEDIDMIKDEWAGKEPNVYGVGLSGLNIEESAKENKFKFQDLKILNVLINLLDNVGIKFEFKDRNDIIKNLELLDNLYLFLIYQKESNNKDSSIDLFIAKNESLNIENLKLKLKEFLLGAGNEFENHNSKTHSLSKKAIDEILPKLLDNNEGWNLEAIKNYDEEIKSQIEDNSSLMAKQDKKYLNDNFLKDAILPPNVKVTFQQAILIFNKIIQKFSKDFEIDKVVIELAREMTQDQENDALKGIAKAQKSKKSLVEERLEANNIDKSVFNDKYEKLIYKIFLWISQDFKDPYTGAQISVNEIVNNKVEIDHIIPYSLCFDDSSANKVLVHKQSNQEKSNSLPYEYIKQGHSGWNWDEFTKYVKRVFVNNVDSILSKKERLKKSENLLTASYDGYDKLGFLARNLNDTRYATILFRDQLNNYAEHHLIDNKKMFKVIAMNGAVTSFIRKNMSYDNKLRLKDRSDFSHHAYDAAIIALFSNKTKTLYNLIDPSLNGIISKRSEGYWVIEDRYTGEIKELKKEDWTSIKNNVQARKIAKEIEEYLIDLDDEVFFSRKTKRKTNRQLYNETIYGIATKTDEDGITNYYKKEKFSILDDKDIYLRLLREREKFVINQSNPEVIDQIIEIIESYGKENNIPSRDEAINIKYTKNKINYNLYLKQYMRSLTKSLDQFSEEFINQMIANKTFVLYNPTKNTTRKIKFLRLVNDVKINDIRKNQVINKFNGKNNEPKAFYENINSLGAIVFKNSANNFKTLSINTQIAIFGDKNWDIEDFKTYNMEKIEKYKEIYGIDKTYNFHSFIFPGTILLDKQNKEFYYISSIQTVRDIIEIKFLNKIEFKDENKNQDTSKTPKRLMFGIKSIMNNYEQVDISPFGINKKIFE

SEQ ID NO: 248 - protein, 1375 aa, Lactobacillus johnsonii
MTKIKDDYIVGLDIGTDSCGWVAMNSNNDILKLQGKTAIGSRLFEGGKSAAERRLFRTTHRRIKRRRWRLKLLEEFFDPYMAEVDPYFFARLKESGLSPLDKRKTVSSIVFPTSAEDKKFYDDYPTIYHLRYKLMTEDEKFDLREVYLAIHHIIKYRGNFLYNTSVKDFKASKIDVKSSIEKLNELYENLGLDLNVEFNISNTAEIEKVLKDKQIFKRDKVKKIAELFAIKTDNKEQSKRIKDISKQVANAVLGYKTRFDTIALKEISKDELSDWNFKLSDIDADSKFEALMGNLDENEQAILLTIKELFNEVTLNGIVEDGNTLSESMINKYNDHRDDLKLLKEVIENHIDRKKAKELALAYDLYVNNRHGQLLQAKKKLGKIKPRSKEDFYKVVNKNLDDSRASKEIKKKIELDSFMPKQRTNANGVIPYQLQQLELDKIIENQSKYYPFLKEINPVSSHLKEAPYKLDELIRFRVPYYVGPLISPNESTKDIQTKKNQNFAWMIRKEEGRITPWNFDQKVDRIESANKFIKRMTTKDTYLFGEDVLPANSLLYQKFTVLNELNNIRINGKRISVDLKQEIYENLFKKHTTVTVKKLENYLKENHNLVKVEIKGLADEKKFNSGLTTYNRFKNLNIFDNQIDDLKYRNDFEKIIEWSTIFEDKSIYKEKLRSIDWLNEKQINALSNIRLQGWGRLSKKLLAQLHDHNGQTIIEQLWDSQNNFMQIVTQADFKDAIAKANQNLLVATSVEDILNNAYTSPANKKAIRQVIKVVDDIVKAASGKVPKQIAIEFTRDADENPKRSQTRGSKLQKVYKDLSTELASKTIAEELNEAIKDKKLVQDKYYLYFMQLGRDAYTGEPINIDEIQKYDIDHILPQSFIKDDALDNRVLVSRAVNNGKSDNVPVKLFGNEMAANLGMTIRKMWEEWKNIGLISKTKYNNLLTDPDHINKYKSAGFIRRQLVETSQIIKLVSTILQSRYPNTEIITVKAKYNHYLREKFDLYKSREVNDYHHAIDAYLSAICGNLLYQNYPNLRPFFVYGQYKKFSSDPDKEKAIFNKTRKFSFISQLLKNKSENSKEIAKKLKRAYQFKYMLVSRETETRDQEMFKMTVYPRFSHDTVKAPRNLIPKKMGMSPDIYGGYTNNSDAYMVIVRIDKKKGTEYKILGIPTRELVNLKKAEKEDHYKSYLKEILTPRILYNKNGKRDKKITSFEIVKSKIPYKQVIQDGDKKFMLGSSTYVYNAKQLTLSTESMKAITNNFDKDSDENDALIKAYDEILDKVDKYLPLFDINKFREKLHSGREKFIKLSLEDKKDTILKVLEGLHDNAVMTKIPTIGLSTPLGFMQFPNGVILSENAKLIYQSPTGLFKKSVKISDL

SEQ ID NO: 249 - protein, 1053 aa, Staphylococcus aureus
MKRNYILGLDIGITSVGYGIIDYETRDVIDAGVRLFKEANVENNEGRRSKRGARRLKRRRRHRIQRVKKLLFDYNLLTDHSELSGINPYEARVKGLSQKLSEEEFSAALLHLAKRRGVHNVNEVEEDTGNELSTKEQISRNSKALEEKYVAELQLERLKKDGEVRGSINRFKTSDYVKEAKQLLKVQKAYHQLDQSFIDTYIDLLETRRTYYEGPGEGSPFGWKDIKEWYEMLMGHCTYFPEELRSVKYAYNADLYNALNDLNNLVITRDENEKLEYYEKFQIIENVFKQKKKPTLKQIAKEILVNEEDIKGYRVTSTGKPEFTNLKVYHDIKDITARKEIIENAELLDQIAKILTIYQSSEDIQEELTNLNSELTQEEIEQISNLKGYTGTHNLSLKAINLILDELWHTNDNQIAIFNRLKLVPKKVDLSQQKEIPTTLVDDFILSPVVKRSFIQSIKVINAIIKKYGLPNDIIIELAREKNSKDAQKMINEMQKRNRQTNERIEEIIRTTGKENAKYLIEKIKLHDMQEGKCLYSLEAIPLEDLLNNPFNYEVDHIIPRSVSFDNSFNNKVLVKQEENSKKGNRTPFQYLSSSDSKISYETFKKHILNLAKGKGRISKTKKEYLLEERDINRFSVQKDFINRNLVDTRYATRGLMNLLRSYFRVNNLDVKVKSINGGFTSFLRRKWKFKKERNKGYKHHAEDALIIANADFIFKEWKKLDKAKKVMENQMFEEKQAESMPEIETEQEYKEIFITPHQIKHIKDFKDYKYSHRVDKKPNRELINDTLYSTRKDDKGNTLIVNNLNGLYDKDNDKLKKLINKSPEKLLMYHHDPQTYQKLKLIMEQYGDEKNPLYKYYEETGNYLTKYSKKDNGPVIKKIKYYGNKLNAHLDITDDYPNSRNKVVKLSLKPYRFDVYLDNGVYKFVTVKNLDVIKKENYYEVNSKCYEEAKKLKKISNQAEFIASFYNNDLIKINGELYRVIGVNNDLLNRIEVNMIDITYREYLENMNDKRPPRIIKTIASKTQSIKKYSTDILGNLYEVKSKKHPQIIKKG

SEQ ID NO: 250 - protein, 1063 aa, Simonsiella muelleri
MEKFHYVLGLDLGIASVGWAAIEIDKETETSIGLLDCGVRTFERAEVPKTGDSLAKARREARSTRRLIRRRSHRLLRLKRLLKREIFRQPETFKDLPINAWQLRVKGLDSRLNEYEWAAVLLHLVKHRGYLSQRKSEMSETDSKSEMGRLLAGVAENHQLLQQEQYRTPAELALKKFVKHFRNKGGDYAHTFNRLDLQAELHLLFQKQRELGNPFTSPELERQVDDLLMTQRSALQGDAILKMLGHCGFEPEQFKAAKNTFSAERFIWLTKLNNLRIQDQGKERALTADERTKLLDEPYKKSKLTYAQVRKLLSLPQTAIFKGLRYDLEHDKKAENSTLMEMKSYHNIRQTLEKSGLKTEWQSIATQPEILDAIGTAFSIYKTDEDISHELKTCRLPENVLNELLKNINFDGFIQLSLTALRKILPLMEQGYRYDEACTQIYGNHHSGSLQQESKQFLPHIPIDDVRNPVVFRTLTQARKVVNAIIRRYGSPARVHIEMARELGKSKSDRDRIEKQQQKNKKERENAVAKFKEDFPDFVGEPRGKDILKMRLYEQQHGKCLYSGHDIDINRLNEKGYVEIDHALPFSRTWDDSQNNKVLVLGSENQNKRNQTPDEYLDGANNSQRWLEFQARVQTCHFSYGKKQRIQLAKLDDETEKGFLERNLNDTRYIARFMCQFVQENLYLTGKGKRLVFASNGGMTATLRNLWGLRKVREDNDRHHALDAIVVACSTASMQQKITKAFQRHESIEYVDTETGEVKFRIPQPWDFFRQEVMIRVFSDQPCEDLVEKLSARPEALHDNVTPLFVSRAPNRKMSGQGHLETIKSAKRLSEENSMVKKPLTTLKLKDIPEIVGYPSREPQLYAALKTRLETHDDDPIKAFAKPFYKPNKNGELGALVRSVRVKGVQNTGVMVHDGKGIADNATMVRVDVYTKAGKNYLVPVYVWQVAQGILPNRAVTSGKSEADWDLIDESFEFKFSLSRGDLVEMISNKGRIFGYYNGLDRANGSIGIREHDLEKSKGKDGVHRVGVKTATAFNKYHVDPLGKEIHRCSSEPRPTLKIKSKK

SEQ ID NO: 251 - protein, 1509 aa, Psychroflexus torquis
MKRILGLDLGTNSIGWSLIEHDFKNKQGQIEGLGVRIIPMSQEILGKFDAGQSISQTADRTKYRGVRRLYQRDNLRRERLHRVLKILDFLPKHYSESIDFQDKVGQFKPKQEVKLNYRKNEKNKHEFVFMNSFIEMVSEFKNAQPELFYNKGNGEETKIPYDWTLYYLRKKALTQQITKEELAWLILNFNQKRGYYQLRGEDIDEDKNKKYMQLKVNNLIDSGAKVKGKVLYNVIFDNGWKYEKQIVNKDEWEGRTKEFIITTKTLKNGNIKRTYKAVDSEIDWAAIKAKTEQDINKANKTVGEYIYESLLDNPSQKIRGKLVKTIERKFYKEEFEKLLSKQIELQPELFNESLYKACIKELYPRNENHQSNNKKQGFEYLFTEDIIFYQRPLKSQKSNISGCQFEHKIYKQKNKKTGKLELIKEPIKTISRSHPLFQEFRIWQWLQNLKIYNKEKIENGKLEDVTTQLLPNNEAYVTLFDFLNTKKELEQKQFIEYFVKKKLIDKKEKEHFRWNFVEDKKYPFSETRAQFLSRLAKVKGIKNTEDFLNKNTQVGSKENSPFIKRIEQLWHIIYSVSDLKEYEKALEKFAEKHNLEKDSFLKNFKKFPPFVSDYASYSKKAISKLLPIMRMGKYWSESAVPTQVKERSLSIMERVKVLPLKEGYSDKDLADLLSRVSDDDIPKQLIKSFISFKDKNPLKGLNTYQANYLVYGRHSETGDIQHWKTPEDIDRYLNNFKQHSLRNPIVEQVVMETLRVVRDIWEHYGNNEKDFFKEIHVELGREMKSPAGKREKLSQRNTENENTNHRIREVLKELMNDASVEGGVRDYSPSQQEILKLYEEGIYQNPNTNYLKVDEDEILKIRKKNNPTQKEIQRYKLWLEQGYISPYTGKIIPLTKLFTHEYQIEHIIPQSRYYDNSLGNKIICESEVNEDKDNKTAYEYLKVEKGSIVFGHKLLNLDEYEAHVNKYFKKNKTKLKNLLSEDIPEGFINRQLNDSRYISKLVKGLLSNIVRENGEQEATSKNLIPVTGVVTSKLKQDWGLNDKWNEIIAPRFKRLNKLTNSNDFGFWDNDINAFRIQVPDSLIKGFSKKRIDHRHHALDALVVACTSRNHTHYLSALNAENKNYSLRDKLVIKNENGDYTKTFQIPWQGFTIEAKNNLEKTVVSFKKNLRVINKTNNKFWSYKDENGNLNLGKDGKPKKKLRKQTKGYNWAIRKPLHKETVSGIYNINAPKNKIATSVRTLLTEIKNEKHLAKITDLRIRETILPNHLKHYLNNKGEANFSEAFSQGGIEDLNKKITTLNEGKKHQPIYRVKIFEVGSKFSISEDENSAKSKKYVEAAKGTNLFFAIYLDEENKKRNYETIPLNEVITHQKQVAGFPKSERLSVQPDSQKGTFLFTLSPNDLVYVPNNEELENRDLFNLGNLNVEQISRIYKFTDSSDKTCNFIPFQVSKLIFNLKKKEQKKLDVDFIIQNEFGLGSPQSKNQKSIDDVMIKEKCIKLKIDRLGNISKA

SEQ ID NO: 252 - protein, 1112 aa, Staphylococcus simulans
MLVGLKFKQSILFENMENAEDIKESATGSDAISLSDDYYENLSEFLTDEQLNFIESANTFFMGIMLDRILKGATSISAAKVRDYKIFKSQLKLIKDIVYQNKYDKYHEFFVTSKEDMRAYQENPDAKNFGKLSKFDQYLIHSKDQYAKLMKDLKGLVPKEYTEVLNLIDEQKFLVVQNTTDNASIPYQNNVFEAENILRNQQKYYPEITEEMIGKVINLISFRIPYYVGPLTNKNGQSDFAWMIRKSDEQTLPWNFDKVIDKSKSAEKFIRRMTSKCTYLLEEDVLPKHSLLYQEMEVLNELNNVQLRGENEPKHRIHRLDPKVKQFIYHNLFQKKKNVTHKDLITLLQNSEHRNTLNKTSGQKLKVFGTQNDSKFASKLSTYNDMKAILGSVENKRQMIEELVLWITIFEDKAILKQKIGEKYPNITEKQLNQIVKLNYSGWGRLSEKLLTKEVNGRSLIDLMYSTENNFMEIITDKTLGFDCFIKNSNKVKNAKISYKDVAELRTSPALKKGIWNAIKMVREISNLFGAPEKIIIEFATEDQAKGKRQKSRSELWDDLVKKNNLKRNKEFEGLFEELKAYPDLDFSNPKLWLYIHQNGKCMYTKKPIDLERLMSDTNNQLYEIDHILPRTFVKDDSINNKVLVIQSANQKKSGDKMPLEIFDNHVLVPFWKMLYENDLISSSKLSKLMKKEFNDLDKEGFIQRQLVETRQIISHVSDFLTEEYPSTTVVPMKANVVSELRRKFDIPKIRQLNDWHHAVDAYLNGFVYQAARVFYPKVNLFEFNFKWEKVREKWRQLGEFTENNKKREFFLFKRMENYVNEYGEGMISKLIFDLDNFKFNYSRKVESTESAFYKQSAFSPKNTTAQYDSDKNKTAIYKEMKNKRGIVVSYTYVKKDQELIGYGVFNETVFEYVNNADVDMNTRALKIVRKAFPKLDIKKAQYLFSINKGDALLVNGHPFLFVSAYERINGKQLEFDIAMQRKIKQALSPYNNMTEQEKVEFYNQFAEKVIEEFRNSIGLQSRDRKVNLIKNLFNNTEKSNDSMTQSILEVLKMTKVSAERSKELKIRWNGQTPNTFIDTKNNAEIQYKSITGLKTTKPKSIFKLAESKNEL

SEQ ID NO: 253 - protein, 1274 aa, Mycoplasma gallisept
MNINMNNSIKSKPEVTIGLDLGVGSVGWAIVDNETNIIHHLGSRLFSQAKTAEDRRSFRGVRRLIRRRKYKLKRFVNLIWKYNSYFGFKNKEDILNNYQEQQKLHNTVLNLKLEALNAKIDPKALSWILHDYLKNRGHFYEDNRDFNVYPTEELANYFDEFGYYKGIIDSKNDDDDKLEEGLTKYKFSNQHWLEEVKKVLSNQTGLPEKFKEEYESLFSYVRNYSEGPGSINSVSPYGIYHLDEKEGKVVQKYNNIWDKTIGKCSIFPDEYRAPKNSPIAMIFNEINELSTIRSYSIYLTGWFINQEFKKAYLNKLLDLLIKTNSEKPIDARQFKKLREETIAESIGKETLKDVESEEKLEKDDHKWKLKGLKLNTNGKIQYNDLSSLAKFVHKLKQHLKLDFLLEDQYTPLDKINFLQSLYVYLGKHLRYSNRVDSANLKEFSDSSRLFERVLQEQKDGLFKLFEQTDKDDEKILTQTHSLSTKAMLLAITRMTNLDNDEDNQKNNDKGWNFEAIKNFDQKFIDITKTNNNLSLKQDKRYLDDQFINDAILSPGVKRILREATKVFNAILKQFSEEYDVTKVVIELARELSEEKELENTKNYKKLIKKNGDKISEGLKALGIAEDKIEEILKSPTKSYKVLLWLQQDHIDPYSQKEIAFDDILTKTEKTEIDHIIPYSISFDDSSSNKLLVLAESNQAKSNQTPYEFINSGKAEITWEVYEAYCHKFKNGDSSLLDSTQRSKKFAKMMKTDTSSKYDIGFLARNLNDTRYATIVFRDALKDYANNHLVEDKPMFKVVCINGGVTSFLRKNFDPKSWYAKKDRDKNIHHAVDASIISIFSNETKTLFNQLTKFADYKLFKNTDGSWKKIDPKTGVVSEVTDENWKQIRVRNQVSEIAKVIDKYIQDSNIERKARYSRKIENKTNISLFNDTVYSAKKVGYEDQIKRKNLKTLDIHESAEENKNSKVKKQFVYRKLVNVSLLNNDKLADLFAEKEDILMYRANPWVINLAEQIFNEYTENKKIKSQNVFEKYMLDLTKEFPEKFSEAFVKSMIRNKTAIIYNVEKDVVHRIKRLKILSSELKENKWSNVIIRSKNESGTKLSYQDTINSIALMIMRSIDPTAKKQYIRVPLNTLNLHLGDQDFDLHNIDAYLKKPKFVKYLKANEIGDEYKPWRVLTSGTLLIHKKDKKLMYISSFQNLNDLIEIKNLIETEYKENVDSDPKKKKKASQILRSLSVILNDYILLDAKYNFDILGLSKNKIDEILNSKLDLDKIAK

SEQ ID NO: 254 - protein, 1122 aa, Artificial Sequence; identical to SEQ ID NO: 23
  Synthetic sequence

SEQ ID NO: 255 - protein, 1236 aa, Artificial Sequence; identical to SEQ ID NO: 21
  Synthetic sequence

SEQ ID NO: 256 - protein, 1059 aa, Artificial Sequence; identical to SEQ ID NO: 15
  Synthetic sequence

SEQ ID NO: 257 - protein, 1166 aa, Artificial Sequence; identical to SEQ ID NO: 39
  Synthetic sequence

SEQ ID NO: 258 - protein, 1149 aa, Artificial Sequence; identical to SEQ ID NO: 37
  Synthetic sequence

SEQ ID NO: 259 - protein, 1314 aa, Artificial Sequence; identical to SEQ ID NO: 27
  Synthetic sequence

SEQ ID NO: 260 - protein, 1064 aa, Artificial Sequence; identical to SEQ ID NO: 38
  Synthetic sequence

SEQ ID NO: 261 - protein, 1401 aa, Artificial Sequence
  Synthetic sequence
MDKKYSIGLDIGTNSVGWAVITDEYKVPSKKFKVLGNTDRHSIKKNLIGALLFDSGETAEATRLKRTARRRYTRRKNRICYLQEIFSNEMAKVDDSFFHRLEESFLVEEDKKHERHPIFGNIVDEVAYHEKYPTIYHLRKKLVDSTDKADLRLIYLALAHMIKFRGHFLIEGDLNPDNSDVDKLFIQLVQTYNQLFEENPINASGVDAKAILSARLSKSRRLENLIAQLPGEKKNGLFGNLIALSLGLTPNFKSNFDLAEDAKLQLSKDTYDDDLDNLLAQIGDQYADLFLAAKNLSDAILLSDILRVNTEITKAPLSASMIKRYDEHHQDLTLLKALVRQQLPEKYKEIFFDQSKNGYAGYIDGGASQEEFYKFIKPILEKMDGTEELLVKLNREDLLRKQRTFDNGSIPHQIHLGELHAILRRQEDFYPFLKDNREKIEKILTFRIPYYVGPLARGNSRFAWMTRKSEETITPWNFEEVVDKGASAQSFIERMTNFDKNLPNEKVLPKHSLLYEYFTVYNELTKVKYVTEGMRKPAFLSGEQKKAIVDLLFKTNRKVTVKQLKEDYFKKIECFDSVEISGVEDRFNASLGTYHDLLKIIKDKDFLDNEENEDILEDIVLTLTLFEDREMIEERLKTYAHLFDDKVMKQLKRRRYTGWGRLSRKLINGIRDKQSGKTILDFLKSDGFANRNFMQLIHDDSLTFKEDIQKAQVSGQGDSLHEHIANLAGSPAIKKGILQTVKVVDELVKVMGRHKPENIVIEMARENQTTQKGQKNSRERMKRIEEGIKELGSQILKEHPVENTQLQNEKLYLYYLQNGRDMYVDQELDINRLSDYDVDHIVPQSFLKDDSIDNKVLTRSDKNRGKSDNVPSEEVVKKMKNYWRQLLNAKLITQRKFDNLTKAERGGLSELDKAGFIKRQLVETRQITKHVAQILDSRMNTKYDENDKLIREVKVITLKSKLVSDFRKDFQFYKVREINNYHHAHDAYLNAVVGTALIKKYPKLESEFVYGDYKVYDVRKMIAKSEQEIGKATAKYFFYSNIMNFFKTEITLANGEIRKRPLIETNGETGEIVWDKGRDFATVRKVLSMPQVNIVKKTEVQTGGFSKESILPKRNSDKLIARKKDWDPKKYGGFDSPTVAYSVLVVAKVEKGKSKKLKSVKELLGITIMERSSFEKNPIDFLEAKGYKEVKKDLIIKLPKYSLFELENGRKRMLASAGELQKGNELALPSKYVNFLYLASHYEKLKGSPEDNEQKQLFVEQHKHYLDEIIEQISEFSKRVILADANLDKVLSAYNKHRDKPIREQAENIIHLFTLTNLGAPAAFKYFDTTIDRKRYTSTKEVLDATLIHQSITGLYETRIDLSQLGGDAYPYDVPDYASLGSGSPKKKRKVEDPKKKRKVD

SEQ ID NO: 262 - protein, 1368 aa, Artificial Sequence
  Synthetic sequence
MDKKYSIGLAIGTNSVGWAVITDDYKVPSKKLKGLGNTDRHGIKKNLIGALLFDSGETAEATRLKRTARRRYTRRKNRICYLQEIFSNEMAKVDDSFFHRLEESFLVEEDKKHERHPIFGNIVDEVAYHEKYPTIYHLRKKLADSTDKVDLRLIYLALAHMIKFRGHFLIEGDLNPDNSDVDKLFIQLVQTYNQLFEENPINASRVDAKAILSARLSKSRRLENLIAQLPGEKKNGLFGNLIALSLGLTPNFKSNFDLAEDAKLQLSKDTYDDDLDNLLAQIGDQYADLFLAAKNLSDATLLSDILRVNSEITKAPLSASMIKRYDEHHQDLTLLKALVRQQLPEKYKEIFFDQSKNGYAGYIDGGASQEEFYKFIKPILEKMDGTEELLAKLNREDLLRKQRTFDNGSIPYQIHLGELHAILRRQEDFYPFLKDNREKIEKILTFRIPYYVGPLARGNSRFAWMTRKSEETITPWNFEEVVDKGASAQSFIERMTNFDKNLPNEKVLPKHSLLYEYFTVYNELTKVKYVTEGMRKPAFLSGEQKKAIVDLLFKTNRKVTVKQLKEDYFKKIECFDSVEISGVEDRFNASLGTYHDLLKIIKDKDFLDNEENEDILEDIVLTLTLFEDREMIEERLKTYAHLFDDKVMKQLKRRRYTGWGRLSRKLINGIRDKQSGKTILDFLKSDGFANRNFMQLIHDDSLTFKEDIQKAQVSGQGDSLHEHIANLAGSPAIKKGILQTVKVVDELVKVMGRHKPENIVIEMARENQTTQKGQKNSRERMKRIEEGIKELGSDILKEYPVENTQLQNEKLYLYYLQNGRDMYVDQELDINRLSDYDVDHIVPQSFLKDDSIDNKVLTRSDKNRGKSDNVPSEEVVKKMKNYWRQLLNAKLITQRKFDNLTKAERGGLSELDKVGFIKRQLVETRQITKHVAQILDSRMNTKYDENDKLIREVRVITLKSKLVSDFRKDFQFYKVREINNYHHAHDAYLNAVVGTALIKKYPKLESEFVYGDYKVYDVRKMIAKSEQEIGKATAKYFFYSNIMNFFKTEITLANGEIRKRPLIETNGETGEIVWDKGRDFATVRKVLSMPQVNIVKKTEVQTGGFSKESILPKRNSDKLIARKKDWDPKKYGGFDSPTVAYSVLVVAKVEKGKSKKLKSVKELLGITIMERSSFEKDPIDFLEAKGYKEVRKDLIIKLPKYSLFELENGRKRMLASAGELQKGNELALPSKYVNFLYLASHYEKLKGSPEDNEQKQLFVEQHKHYLDEIIEQISEFSKRVILADANLDKVLSAYNKHRDKPIREQAENIIHLFTLTNLGAPAAFKYFDTTIDRKRYTSTKEVLDATLIHQSITGLYETRIDLSQLGGD

SEQ ID NO: 263 - protein, 1368 aa, Artificial Sequence
  Synthetic sequence
MDKKYSIGLDIGTNSVGWAVITDDYKVPSKKLKGLGNTDRHGIKKNLIGALLFDSGETAEATRLKRTARRRYTRRKNRICYLQEIFSNEMAKVDDSFFHRLEESFLVEEDKKHERHPIFGNIVDEVAYHEKYPTIYHLRKKLADSTDKVDLRLIYLALAHMIKFRGHFLIEGDLNPDNSDVDKLFIQLVQTYNQLFEENPINASRVDAKAILSARLSKSRRLENLIAQLPGEKKNGLFGNLIALSLGLTPNFKSNFDLAEDAKLQLSKDTYDDDLDNLLAQIGDQYADLFLAAKNLSDATLLSDILRVNSEITKAPLSASMIKRYDEHHQDLTLLKALVRQQLPEKYKEIFFDQSKNGYAGYIDGGASQEEFYKFIKPILEKMDGTEELLAKLNREDLLRKQRTFDNGSIPYQIHLGELHAILRRQEDFYPFLKDNREKIEKILTFRIPYYVGPLARGNSRFAWMTRKSEETITPWNFEEVVDKGASAQSFIERMTNFDKNLPNEKVLPKHSLLYEYFTVYNELTKVKYVTEGMRKPAFLSGEQKKAIVDLLFKTNRKVTVKQLKEDYFKKIECFDSVEISGVEDRFNASLGTYHDLLKIIKDKDFLDNEENEDILEDIVLTLTLFEDREMIEERLKTYAHLFDDKVMKQLKRRRYTGWGRLSRKLINGIRDKQSGKTILDFLKSDGFANRNFMQLIHDDSLTFKEDIQKAQVSGQGDSLHEHIANLAGSPAIKKGILQTVKVVDELVKVMGRHKPENIVIEMARENQTTQKGQKNSRERMKRIEEGIKELGSDILKEYPVENTQLQNEKLYLYYLQNGRDMYVDQELDINRLSDYDVDAIVPQSFLKDDSIDNKVLTRSDKNRGKSDNVPSEEVVKKMKNYWRQLLNAKLITQRKFDNLTKAERGGLSELDKVGFIKRQLVETRQITKHVAQILDSRMNTKYDENDKLIREVRVITLKSKLVSDFRKDFQFYKVREINNYHHAHDAYLNAVVGTALIKKYPKLESEFVYGDYKVYDVRKMIAKSEQEIGKATAKYFFYSNIMNFFKTEITLANGEIRKRPLIETNGETGEIVWDKGRDFATVRKVLSMPQVNIVKKTEVQTGGFSKESILPKRNSDKLIARKKDWDPKKYGGFDSPTVAYSVLVVAKVEKGKSKKLKSVKELLGITIMERSSFEKDPIDFLEAKGYKEVRKDLIIKLPKYSLFELENGRKRMLASAGELQKGNELALPSKYVNFLYLASHYEKLKGSPEDNEQKQLFVEQHKHYLDEIIEQISEFSKRVILADANLDKVLSAYNKHRDKPIREQAENIIHLFTLTNLGAPAAFKYFDTTIDRKRYTSTKEVLDATLIHQSITGLYETRIDLSQLGGD

SEQ ID NO: 264 - protein, 1368 aa, Artificial Sequence
  Synthetic sequence
MDKKYSIGLAIGTNSVGWAVITDDYKVPSKKLKGLGNTDRHGIKKNLIGALLFDSGETAEATRLKRTARRRYTRRKNRICYLQEIFSNEMAKVDDSFFHRLEESFLVEEDKKHERHPIFGNIVDEVAYHEKYPTIYHLRKKLADSTDKVDLRLIYLALAHMIKFRGHFLIEGDLNPDNSDVDKLFIQLVQTYNQLFEENPINASRVDAKAILSARLSKSRRLENLIAQLPGEKKNGLFGNLIALSLGLTPNFKSNFDLAEDAKLQLSKDTYDDDLDNLLAQIGDQYADLFLAAKNLSDATLLSDILRVNSEITKAPLSASMIKRYDEHHQDLTLLKALVRQQLPEKYKEIFFDQSKNGYAGYIDGGASQEEFYKFIKPILEKMDGTEELLAKLNREDLLRKQRTFDNGSIPYQIHLGELHAILRRQEDFYPFLKDNREKIEKILTFRIPYYVGPLARGNSRFAWMTRKSEETITPWNFEEVVDKGASAQSFIERMTNFDKNLPNEKVLPKHSLLYEYFTVYNELTKVKYVTEGMRKPAFLSGEQKKAIVDLLFKTNRKVTVKQLKEDYFKKIECFDSVEISGVEDRFNASLGTYHDLLKIIKDKDFLDNEENEDILEDIVLTLTLFEDREMIEERLKTYAHLFDDKVMKQLKRRRYTGWGRLSRKLINGIRDKQSGKTILDFLKSDGFANRNFMQLIHDDSLTFKEDIQKAQVSGQGDSLHEHIANLAGSPAIKKGILQTVKVVDELVKVMGRHKPENIVIEMARENQTTQKGQKNSRERMKRIEEGIKELGSDILKEYPVENTQLQNEKLYLYYLQNGRDMYVDQELDINRLSDYDVDAIVPQSFLKDDSIDNKVLTRSDKNRGKSDNVPSEEVVKKMKNYWRQLLNAKLITQRKFDNLTKAERGGLSELDKVGFIKRQLVETRQITKHVAQILDSRMNTKYDENDKLIREVRVITLKSKLVSDFRKDFQFYKVREINNYHHAHDAYLNAVVGTALIKKYPKLESEFVYGDYKVYDVRKMIAKSEQEIGKATAKYFFYSNIMNFFKTEITLANGEIRKRPLIETNGETGEIVWDKGRDFATVRKVLSMPQVNIVKKTEVQTGGFSKESILPKRNSDKLIARKKDWDPKKYGGFDSPTVAYSVLVVAKVEKGKSKKLKSVKELLGITIMERSSFEKDPIDFLEAKGYKEVRKDLIIKLPKYSLFELENGRKRMLASAGELQKGNELALPSKYVNFLYLASHYEKLKGSPEDNEQKQLFVEQHKHYLDEIIEQISEFSKRVILADANLDKVLSAYNKHRDKPIREQAENIIHLFTLTNLGAPAAFKYFDTTIDRKRYTSTKEVLDATLIHQSITGLYETRIDLSQLGGD

SEQ ID NO: 265 - protein, 240 aa, Acetobacter aceti
MANIAENLVFGIDLGIGSCGWAVLNQKAKDENIVALGSWCFDVPETDKERIPTNQIRRANRLLRRVIRRRRNRMAEIRRLFASKGMLDTADPDALAKISADPWEMRAKGLDYQLTPQEFAVALGHIAKRRGFKSAAKRVSTNAPSEDSKMLAALEKTKEQSAQYRTIGEMFARDPAYADRRRNRDGCFDRTMSREDLFKETQILFESQRRLGNFSATSETEQAFIDIAFRQKPMQDSERL

SEQ ID NO: 266 - protein, 400 aa, Acetobacter aceti
SFERFRLLCRLVNLRVTDGLEDRPLTPEELRLACEDAGKTRKLSVKKVRSLIGLRDDQRFTTIPPDQEQHDIAARTGDALTGTATFRAILGESFWRQLLPHPEQLDRAAWIISFHELTDTIISKLATIGLPSEVMELIRKALEDGKFSKFKGAASLSDKAARKLIPFLQEGLTYDKACQKAGYNHAASKFTHYDSIDTKAKFNSLMDDVRDSITNPVARKAISEGMKQVWAMRNQWGLPGAICIELARDVGNSAEKRREIESGIKKNTAQRERERQEAKEHLNQSDISSETLLRYRLWKEQGGRCCYTDQPITPSQLIASDNSVQVDHILPWSRFGDDSYLNKALCTAKANQEKKNRTPWEWIHNQKGVEAWNHFTAAVESRKETRGLKKRNFLLKSSKE

SEQ ID NO: 267 - protein, 376 aa, Acetobacter aceti
YAARVMAEAVRLLYPSGNRAEKGGVKRVFTRPGALTAALRHAWGVESLKKINGKRLNDDRHHALDAAVVAAVSEKEIQKLTKSFQICEQKGLARPMRDVPMPWEGFRHQLETAYADIRVARPERRRARGKGHDATIRQLREEKDGPVVYERRAISDLKLTDLERIKDPERNSAIISSLRTWIEKGKPADYPPQSPKGDEIRKIRVMSRNKPAVSVRGGTADRGEMTRVDVFTKMGKKGKPEWFLVPIYRHQVIDRIQWPQPPNQAAANGKSEKNWPTMGLEHEFRFSLYPRSYVQIVKRDGEIIEGYFAGLDRTVAAFSLLSSSDPTSIQRGIGAKTLESIRKYNVNRFGDISMVEQETRTWHGDVCISPDQPDSA

SEQ ID NO: 268 - protein, 1054 aa, Actinobacillus suis
MKLTPLNYILGLDLGIASVGWAVVEIDEQENPLGLIDVGVRTFDRAEVPKTGESLALARRLARSARRLVKRRADRIKKAKRLLKAENILLSADEHLPNDVWQLRVKGLDQKLERQEWAAVLLHLLKHRGYLSQRKNESKSENKELGALLSGVETNHQILQSAEYRTPAEIAVKKFHVEDGHIRNQRGAYTHTFSRLDLLAEMELLFQRQTDLGNPHTSAKLLENLTALLMWQKPALAGEAILKMLGKCTFEPTEYKAAKNSYSAERFVWLTKLNNLRILEQGAERALTDNERFALLDQPYEKAKFTYAQARTMLALPDEAIFKGVRYQGEDKKAVETKTILMEMKAYHQIRKALENADLKAEWNELKNNSELLDDIGTAFSLHKTDEDICRYLDGKLSESILNALLENLNFDKFIQLSLKALQQILPLMLQGQRYDEAVSAIYGDHYGKKSAEINRLLPTIPADEIRNPVVLRTLTQARKVINAVVRLYGSPARIHIETGREVGKSYQDRKKLEKQQEDNRKQRESAVKKFKEYFPNFVGEPKGKDILKMRLYELQQAKCLYSGKSLELHRLLEKGYVEVDHALPFSRTWDDSFNNKVLVLANENQNKGNLTPYEWLDGKNNSEHWQNFVARVQTSGFSHTKKQRILSHKLDEKGFIERNLNDTRYVARFLCNFIADNMLLTGKGKRKVFASNGQITALLRGRWGLQKVRDDNDRHHALDAVVVACSTVVMQQKITRFVRYEEGNVFSGERIDRETGEIIPLHFPSPWAFFRENVEIRIFSENPKLELENRLPDYPQYNHEFVQPLFVSRMPTRKMTGQGHMETVKSAKRLDEGLSVLKVPLTQLKLSDLERMVNREREVTLYESLKARLEQFGNDPAKAFAEPFHKKGGAVVKAVRVEQTQKSGVLVRDGNGVADNASMVRVDVFTKGGKYFLVPIYTWQVAKGILPNKAVTANVDEIDWLEMDESYQFIFTMYPNDLVKVKLKKEEFFGYYGGLDRATGAIVIKEHDLEKSKGKQGIYRIGVKLALSFEKYQVDELGKNIRPCRPTKRQHVR

SEQ ID NO: 269 - protein, 239 aa, Actinobacillus ureae
MEIRIFSENPKLGLENRLPGYPQYNHEFVQPLFVSRMPTRKMTGKGHMETVKSAKRLDEGLSVLKVPLTQLKLSDLERMVNREREDALYQSLKAHLEQFGNDPAKAFAEPFHKKGGTVVKAVRVEQTQKSGVLVRDGNGVADNTSMVRVDVFTKAGKYFLVPIYKWQVAKRILPNKAVTAGVDEIDWLEMDSSYQFIFTMYANDLVKVKLKKRSILGLLRWFRSCNWGYCYQRTRFREI

SEQ ID NO: 270 - protein, 400 aa, Actinobacillus ureae
MKLTPLNYILGLDLGIASVGWAVVEIDEQENPLGLIDVGVRTFDRAEVAKTGESLALARRLARSSRRLVKRRADRIKKAKRLLKAENLLLSADEILPNDVWQLRVKGLDQKLERQEWAAVLLHILKHRGYLSQRKNESKSENKELGALLSGVATNHQLLQTAEYRTPAEITVKKFQAEENGHGHIRNQRGDYSHTFDRKDLLAEMKLLFQRQAELGNPHTSEKLLENLTTLLLWQKPALAGEAILKMLGKCTFEPAEYKAAKNSYSAERFVWLTKLNNLRILENGIERALTDNERFTLLDQPYEKAKLTYAQARTMLALSDEAIFKGVRYQGEDKKAAEKVALIEMKGYQHIRKALEGAGLKAEWNELKNNSELLDDIGTAFSLYFSISNLPTEIAYFTP

SEQ ID NO: 271 - protein, 1113 aa, Actinomyces georgiae
MSASSQNVERIRYKVGIDVGLRSIGFCAVQVDADDRPVKLLNTVVHVHDAGVSPADAKKADTRKLVSGVARRTRRLYRTRKRRLVDLDRQLDGLGWPLVDPARFADPREPWFAREKLVSGRVDDADERKELLSVALRHIAHHRGWRNPYSTVESLQADAPPSEFLQGLNQRVSEKLGTELDPGLTQGQLVAKLLHRFPNAKIRGPEGILRGKLHQSDNAGELRLICRTQGLDCHITEELVRLVFQAKSPKANKEMRKRIGRDQLPGQGAHIRAEKAHPVFQRFRIVAVLANLRIREAHVDRRLTAEEMRTLTDFLLGLAGSEQPTWEELADNLNIERHQLRGTAKASVDGAPALRFPPIDATTDRIYASKLKWLAEWWRQADEERRGYMVDALSNSGGSEDEPYLDDEIAEMLEQASEEDQAKLDSLHLPGGRASYCLDTLRRLTDAMLGGGLDLFEARKAVFHVDDDWAPPTDPIGAPVGNPPVDRVLKHVARWLEAATGRWGAPQTINIEHVREGLGSEKAARELTRMNDRRRRNNQKLVEEMGEKLGMSGRIRRSDRMRYEAIRRQNCECLYCGQPITYQTMEMDHIVPRAGAASTNSRSNLAAVCRRCNHQKGKLPFAVWAESQDSPAEVRLQDAVQRVRHWLRDAGMGQKELQALRVQVIARLKSKRPDEEFDGRSMESIAWMANELRARVEAQYRGSGTTVRVYRGALTAEARKASGFEGRVNLIGGRGKDRFDRRHHAMDALVIALMNQSVAQTLALRLNMRDSQWLTQSEQTWRQFHGAPGEAARKWEAWDRDMRDASDLFNLALDGGRIPITENVRLRVGNGRVHEDGVIRFKPEYEVKGKTIKGGEARLLGDSLPSEQIDRAETPALWTALTRLPEYDRKSGLPENPDRVIRVNGAVVQATDRIRFFGTPASVAVRGGYAKLGESIHHARIYRINGKTPKYAMIRVYTIDLMRLNHEDIFTAVLKPSTISMRCAEKKLKYAIAEGNAEQIGWLVEGDQLELDAAAYAKGVGADLMREYPMATCWRVAGFPDEAKLRLRPVLLAAEGMGEDAPKFMREVLENQGWRPAVNALLSPGSVRVVRRNVLGEPRFKSSGHLPTTVDLV

SEQ ID NO: 272 - protein, 1101 aa, Actinomyces naeslundii
MWYASLMSAHHLRVGIDVGTHSVGLATLRVDDHGTPIELLSALSHIHDSGVGKEGKKDHDTRKKLSGIARRARRLLHHRRTQLQQLDEVLRDLGFPIPTPGEFLDLNEQTDPYRVWRVRARLVEEKLPEELRGPAISMAVRHIARHRGWRNPYSKVESLLSPAEESPFMKALRERILATTGEVLDDGITPGQAMAQVALTHNISMRGPEGILGKLHQSDNANEIRKICARQGVSPDVCKQLLRAVFKADSPRGSAVSRVAPDPLPGQGSFRRAPKCDPEFQRFRIISIVANLRISETKGENRPLTADERRHVVTFLTEDSQADLTWVDVAEKLGVHRRDLRGTAVHTDDGERSAARPPIDATDRIMRQTKISSLKTWWEEADSEQRGAMIRYLYEDPTDSECAEIIAELPEEDQAKLDSLHLPAGRAAYSRESLTALSDHMLATTDDLHEARKRLFGVDDSWAPPAEAINAPVGNPSVDRTLKIVGRYLSAVESMWGTPEVIHVEHVRDGFTSERMADERDKANRRRYNDNQEAMKKIQRDYGKEGYISRGDIVRLDALELQGCACLYCGTTIGYHTCQLDHIVPQAGPGSNNRRGNLVAVCERCNRSKSNTPFAVWAQKCGIPHVGVKEAIGRVRGWRKQTPNTSSEDLTRLKKEVIARLRRTQEDPEIDERSMESVAWMANELHHRIAAAYPETTVMVYRGSITAAARKAAGIDSRINLIGEKGRKDRIDRRHHAVDASVVALMEASVAKTLAERSSLRGEQRLTGKEQTWKQYTGSTVGAREHFEMWRGHMLHLTELFNERLAEDKVYVTQNIRLRLSDGNAHTVNPSKLVSHRLGDGLTVQQIDRACTPALWCALTREKDFDEKNGLPAREDRAIRVHGHEIKSSDYIQVFSKRKKTDSDRDETPFGAIAVRGGFVEIGPSIHHARIYRVEGKKPVYAMLRVFTHDLLSQRHGDLFSAVIPPQSISMRCAEPKLRKAITTGNATYLGWVVVGDELEINVDSFTKYAIGRFLEDFPNTTRWRICGYDTNSKLTLKPIVLAAEGLENPSSAVNEIVELKGWRVAINVLTKVHPTVVRRDALGRPRYSSRSNLPTSWTIE

SEQ ID NO: 273 - protein, 1181 aa, Actinomyces sp.
MLHCIAVIRVPPSEEPGFFETHADSCALCHHGCMTYAANDKAIRYRVGIDVGLRSIGFCAVEVDDEDHPIRILNSVVHVHDAGTGGPGETESLRKRSGVAARARRRGRAEKQRLKKLDVLLEELGWGVSSNELLDSHAPWHIRKRLVSEYIEDETERRQCLSVAMAHIARHRGWRNSFSKVDTLLLEQAPSDRMQGLKERVEDRTGLQFSEEVTQGELVATLLEHDGDVTIRGFVRKGGKATKVHGVLEGKYMQSDLVAELRQICRTQRVSETTFEKLVLSIFHSKEPAPSAARQRERVGLDELQLALDPAAKQPRAERAHPAFQKFKVVATLANMRIREQSAGERSLTSEELNRVARYLLNHTESESPTWDDVARKLEVPRHRLRGSSRASLETGGGLTYPPVDDTTVRVMSAEVDWLADWWDCANDESRGHMIDAISNGCGSEPDDVEDEEVNELISSATAEDMLKLELLAKKLPSGRVAYSLKTLREVTAAILETGDDLSQAITRLYGVDPGWVPTPAPIEAPVGNPSVDRVLKQVARWLKFASKRWGVPQTVNIEHTREGLKSASLLEEERERWERFEARREIRQKEMYKRLGISGPFRRSDQVRYEILDLQDCACLYCGNEINFQTFEVDHIIPRVDASSDSRRTNLAAVCHSCNSAKGGLAFGQWVKRGDCPSGVSLENAIKRVRSWSKDRLGLTEKAMGKRKSEVISRLKTEMPYEEFDGRSMESVAWMAIELKKRIEGYFNSDRPEGCAAVQVNAYSGRLTACARRAAHVDKRVRLIRLKGDDGHHKNRFDRRNHAMDALVIALMTPAIARTIAVREDRREAQQLTRAFESWKNFLGSEERMQDRWESWIGDVEYACDRLNELIDADKIPVTENLRLRNSGKLHADQPESLKKARRGSKRPRPQRYVLGDALPADVINRVTDPGLWTALVRAPGFDSQLGLPADLNRGLKLRGKRISADFPIDYFPTDSPALAVQGGYVGLEFHHARLYRIIGPKEKVKYALLRVCAIDLCGIDCDDLFEVELKPSSISMRTADAKLKEAMGNGSAKQIGWLVLGDEIQIDPTKFPKQSIGKFLKECGPVSSWRVSALDTPSKITLKPRLLSNEPLLKTSRVGGHESDLVVAECVEKIMKKTGWVVEINALCQSGLIRVIRRNALGEVRTSPKSGLPISLNLR

SEQ ID NO: 274 - protein, 1120 aa, Actinomyces sp.
MNAMKQYNAGIDVGINSVGFAAIEVDSKGLPLNILNNMVVLHDSGVDPGTAKTGATRLANSGTARRTRKLIARRRKRLQKLDRYIEVQGWPLVDFSSLPDPYTPWKIRAKLTQDRLEGEEQGRGLSIALRHMARHRGWRNPYEGVESLHSPKEASKQFKDLKDRVTKVSGVIFDEDATPAEVVCDIGLSPKQRLRSAPSAKYKEGATLADEPVGGKSKEGLLGGKLMQSDNANELRKIGIVQGLSNEKVNEIIDQVFASESPKGQAGKRAKKDELPGQEQYVRALRAHLAFQRFRIVAAVANLRILEAEPKHERLLSQSEKDKVIEFLMSADGDDGVTWSDVAEELGIERECLSGTAKRGADGERPSSFPPTNSTNISIVRSKVKPLIEWWRKASDDEQATLVTALSNADELTDDQPSAETVRQFLSSPDEQSQEKIDKISLPKGRAAYSVNSLERLTRRMLKDSVDLFEARKREFGVDNNWTPTPDSIGEPVGNPAVDRVLKIVNRWLLAVTRKWGPPKVVNIEHVRVGFTSAAQTRKYEEENKTNRERNLAILEELRDKFGTSGKIRREDITRFAALRRQNCQCAYCGEAITFFDCEMDHIVPRKGPGSTNTRNNLVAICERCNKSKSNMPFSLWAQNCDIPGVSVEAVIDRVRTWIKDPELNPKQYNNFKKDVIERLRKTVDDDAIDNRSIESVAWMATELADRIGSHFRTAGANTKVRVYRGWLTSEARKASGFEGKINLIGGRGKTRLDRRHHAMDAATIALMRQSVAQTLVERASIRESDRLRRVVSSSWKDYRGADRDKQFSYGSWLNSMNALAELFNRAIDADGIPVTQNLRLRLGNGEAHDATIRSLEKKRVGASWTIGEIDRASTPQLWLALTRQEDFDQNDGLPANASRELRVKNHWFHAEENVTLFPTKSAAIAVRGGYAEIGNTIHHARLYKLPGKKLTYGMIRVFAIDLLCAWHTDLFSSPLLPESISLRTAETKVRRAVEDGAAMYIGWLVDGDEIVLDPETKAFKSNKIGEYLCEFPGTKRWKVDGFPDKEKLRLRPLQLAGEGLPEDVSAGTEEILGPKGNGWRVAINALFKSSQLVVVRRTALGMVRKLSRRHLPLTTRLRG

SEQ ID NO: 275 - protein, 1095 aa, Actinomyces sp.
MPAHHLRVGIDVGTHSVGLATLRVDDQGTPIELLSALSHIHDSGIGKEGQKDHDTRKKLSGVARRTRHLLRNRRERLQQLDKVLVDLGFPIPKPEEYPDLSERTDPYRVWRVRARLVEETLPEELRGPAISMAVRHIARHRGWRNPYSKVESLLSPAEESSFMKALRKRIMTKTGEVLDDDITPGQAMAQVALTHKIYMRGPEGILGKLHQSDNANEIRKICARQGISSDVCKQLLRAVFKAESPRGSAVSRVAPDPLPGQGSFRRAPKCDPEFQRFRIISIVANLRISETKGENRPLTVDERRQVVAFLMEDSQADLTWVDVAEKLRVSRQALRGTAMLTADGERSAAQPPIDVTDQIMRKTKISALKTWWDKADAERRGAMVRYLYEGLEDSECAEVIAKLPEKDHAKLDSLHLPAGRAAYSRESLTALSDHMLETTNDLHEARKRLFGVDDSWAPPAEPVGAPVGNPSVDRTLKIVARYLSAVESIWGTPEVIHVEHVRDGFTSERTAEERDKANRSRHNDNQKAIEKIQHDYGKEGYISRGDIVRFHALKLQGSACLYCGTTIGYHTCQLDHIVPQAGPGSNNRRGNLVAVCERCNHSKSNTPFAVWAQKCGIPHVGVKEAISRVNGWVEHNHSTSSGDLTRLKKEVIARLRRTQKDPEIDERSMESVAWMANELHHRIAAAYPETTVMVYRGSITAAARKAASIESRINLIGEKGRKDRLDRRHHAVDASVVALMEPSVAKTLAERSSLRGEQRLTGQEQTWKQYTGLTVGARERFEAWRGHMHRLTELFNESLAADEVYVTQNIRLRLSDGSAHTVKASKLVSHRLGDGLTVQQIDRACTPALWCALTREIDFDEKNGLPAREDRVIRVHGQEISSADCIQVFSKRKKTKSDRDEAPFGAIAVRGGFVEIGSSIHHARIYRIEGEKPAYAMLRVFTHDLLSQRHGDLFSAVIPPQSISMRCAATELRQAISEGRATYLGWIVSGDELHIPVETFTTHKIGSFLKDYPNTTRWRICGYDSETMLILKPRILSAEGLNNSSDIAEYVIKNKGWRVAINKLAKVHPTVVRRDALGRPRHSSRSNLPVTWSIE

SEQ ID NO: 276 - protein, 1144 aa, Actinomyces sp.
MSMIDSSENVPGIRYRVGIDVGLKSIGFCAVEVDRNDQPVRMLNSMVFIHDAGVDPNENKAAKSRKLTAGVARRTRRLYRTRHQRLVNLDRVLSKEFGWPLPDLTSFKDPREPWHVRAGLLEGYIADDEKRKEALSIALRHIARHRGWRNPYAKVETLLQPSEPSDFLKGLNDRISEELGRAFPADATPGQLVDTYLAHPDYVGRAGTPKLRGPQGILAGKLHQSDNAQEIRGICDVQRIEPAERDRLIRVVFEAKSPKGSAKERGLVGYDELPGQGRHVRAEKAHPAFQLFRMVSVLANLRIREGREERPLTPDELEDLVDFINQVSLKQEVTWQDLADKLRIERADLRGTAKASFDGSPVLRNPPTDVTTEKIMACKVKWLKEWWKEADDEQRGYMVDAFSNSGGSEDGTDVNDEVAELLEQATEDDQLEFEKISLPQGRAAYSLDSLRRLTDRMLRDGVDLHTARRLEFNVGDDWKPAVEPIGAPTGNPAVDRVLKQVSRWLHAATERWGEPTVINIEHARDGLGSERVARELMRENEKRRKANASAVAEMAAKLKLSGKVHRSDQIRYFALQRQNCQCLYCGAPITYTTAEMDHIVPRADGSSTNDRSNLAAVCRTCNHMKGKIPFAVWASSDKANQGVSLTGALERVNMWQRDSGMSPRQLKQLQREVCARLKSKKPDQEFDGRSMESVAWMAVELRTRIEGFYRSRDEESVPSVGVYRGQLTAEARRASGFESRVNLIGGRGKTRFDRRHHAMDALVIALMNPSVSRTLALRLNMRDAQRLTGVEETWKHFYGKPGEASKRFESWRESMLRGVELFNIALSDNAIPFVENIRLRVGSSVIHDATVHSFCPPKTPDGKQIITKGYGEQHSLGSAMPVELIDRAETPALWTALTRCPDFDPKKGLPENPQRTISVNGTRVGPTELVNFFEFSKSGPKACLKVRGGYVDLSGAIHHARIYRIAGKKTAYAMIRVFQVDLLRLKDHDVFTTPLKPSTISMRTAEPKIREALANGTATQIGWLVEGDELVIDTSKYSGGFIGEVLARYPEATSWRVAGFMTPAKLRIKPILLSKEGFVDETQAALLGVEVTSEAIQKTVDRPGWLPAVNVLFGAGGVRVIRRNCLGEERYHSSASLPVSMTLE

SEQ ID NO: 277 - protein, 1103 aa, Actinomyces sp.
MTKINDDLRYRVGIDVGLKSIGFCAVEVDENDQPLRLLNSMVFVHDAGVDPNENKAAKSRKLTAGVARRTQRGTAQNRRRLAELDRALSEELNWPLPNLEDFEDSYEPWHTRAELVEHYIKDDAERAEALAIAIRHIARHRGWRNPYLSVDSLLTPQEPSKFLRGLNERVTQALGREFPADATPGQLICAYIDSPKYAETQGIRGDSGILSGKLHQFDNVGEIRKICEVQRLDHDVFKLLVRKVFFAKSPRGSAAGLVGHDQIPGQGKYIRAEKAHPDFQLFRIVAVLTNLRIREGKAERCLTPDELRGLVDYILEVQLKQQVTWADLADNLGIERTDLRGTARASFDGSPALRFPPTDVTAEKIMASKVKWLKDWWDKADSERRGFMVDALSNSGGSTGDNDIDDEVAALLEAATEDEQAELEKIQLPQGRAAYSLDSLRRLTKRMLEEGVDLHTARKEEFNVDDDWRPEPEPIEAPVGNPAVDRVLKQVARWLNMATDRWGVPDVINIEHTRDGLGSEKVARELLRESQKRQDLNQKDMDKMIRELGISGKARRSSLIKYQAIQRQNSMCLYCGTEIGFETAEMDHIVPRALSGSTNDRSNLAAVCRACNHQKGAVPFAVWATSGEAHAGVSLEDAIKRVRLWQKGPGMSPKQHKAFQNEVISRLKSRKPDEEFDGRSMESVAWMAVELRTRIDGYYRKVNSDSVPKVGIYRGQLTAEARKASGFENRVNLIGGKGKTRFDRRHHAMDALVIAMMNQSVSQTLALRVNMRESQRITGQEETWKNFYGKPGQASERFEKWREGMLRAVELFNIELAKNAIPFHENVRLRVGSSKVHDDTVRKFIHAKLGEALSVAMIDCAETPALWTALTRLPDFDPKDGLPEDLSREIYIHSRKITADEQLNFFNSPSACLKVRGGYVEIGSSIHHARVYRIDGKKTTYSMVRVFATDLVKMTHEDVFTTPLKPSTISMRTADPKIRKALADGTATQIGWLVEGDELQLETDKYSGGLIGEVLAEYPQLTSWRVAGFYGVTQLRLRPYMLAAEGIPSDASESLRKVIEGKGWLPAINALLSSGCVKVVRRNCLGEPRFNAKSSLPVSQLLR

SEQ ID NO: 278 - protein, 1114 aa, Actinomyces turicensis
MQFHFYMVYVTMKGMNDKDASQQLRYRVGIDVGTHSIGFCAVEVDESGMPIQLLNSMVHKHDSGIDPGGNDTATTRLAEAGVARRTRRLIRRRKKRLQELDAFIEECGWPLVDLATITDARSPWRIRAHLATEHIDDEAEQGKLLSIALRHMARHRGWRSPYARISSLHIQADPSEQLKALAQRVSEKTGISLTADQTPAQLISVYLDVFETGKLRGPEGILGGKLMQSDNANELRRIATVQGLDNDLLKKIIGFVFAAESPKGSAAKRVGKDVLPGAHGLRAEKAHPAFQQFRIVSIVQNLRIKEGTGLRALTSEETEIVVDFLNQAGLTEAPTWEEVADNLEIPRSHLKGTATEGFDGIAPSTRPPFDVTSQKILNGKLKKLSAWWKDADYDHRCAMVNALSNVGSDDEGSLADDDVREFLSDFTDEELEALDKVELPGGRAAYSVDSLEKLTNTMLSEGCDLHSARKIAFGVDDSWTPPAEPIGQPVGNPAVDRVLKQVARWISAATNQWGTPESVNIEHVRDALGSEKASREYQRSLQTRRIRNEKLFAEMRERLDIGGKPRRSELTRYLALQRQNCQCLYCGMPITYTDAEMDHIVPRKGAASTNTRENFAAVCRACNHQKSNLPFAVWAEKTERPGVSVKEAYKRVSDMRIEPGMNGRQMNEFRKAIRLRLTTKHADAEIDGRSLESVAWMANELRHRIEGFYRSAENDVTVRVFRGAVTAEGRRASGFESRVNLIGGKGKTRLDRRHHAMDALTIALMEPGIAQTIALRMNMRESQRVLGEQETWKSFTGGSDTARKRWEHWCEEMLRASELFNVFLAEDRIPICQNKRLRLGSSAVHKAIVQPFEASDKRIVSDAMPVELIDRASTPALWTALTRDPDFDPKEGLPANPSRTIRLHDKRLGPNETVEFFPTAAACLAIRGGYCEIGAGIHHARIFRISGKKTTYAMLRVYQCDLVRFQKENLLTVELPANTISVRTAVPKLREALAHGTAEQIGWLVVGDELKIDLSGFTTGQIETFNETYPQATRWEVTGFPTKTQLRLKPLLIASEGLADDVPDDIVKIVKGPGWWPAIDKLLKIGNVVLYRRDTHGKPRVVSHRSLPLSSKLQ

SEQ ID NO: 279 - protein, 1113 aa, Alcanivorax sp.
MRYRVGLDLGTASVGAAVFSMDEQGNPMELIWHYERLFSEPLVPDMGQLKPKKAARRLARQQRRQIDRRASRLRRIAIVSRRLGIAPGRNDSGVHGNDVPTLRAMAVNERIELGQLRAVLLRMGKKRGYGGTFKAVRKVGEAGEVASGASRLEEEMVALASVQNKDSVTVGEYLAARVEHGLPSKLKVAANNEYYAPEYALFRQYLGLPAIKGRPDCLPNMYALRHQIEHEFERIWATQSQFHDVMKDHGVKEEIRNAIFFQRPLKSPADKVGRCSLQTNLPRAPRAQIAAQNFRIEKQMADLRWGMGRRAEMLNDHQKAVIRELLNQQKELSFRKIYKELERAGCPGPEGKGLNMDRAALGGRDDLSGNTTLAAWRKLGLEDRWQELDEVTQIQVINFLADLGSPEQLDTDDWSCRFMGKNGRPRNFSDEFVAFMNELRMTDGFDRLSKMGFEGGRSSYSIKALKALTEWMIAPHWRETPETHRVDEEAAIRECYPESLATPAQGGRQSKLEPPPLTGNEVVDVALRQVRHTINMMIDDLGSVPAQIVVEMAREMKGGVTRRNDIEKQNKRFASERKKAAQSIEENGKTPTPARILRYQLWIEQGHQCPYCESNISLEQALSGAYTNFEHILPRTLTQIGRKRSELVLAHRECNDEKGNRTPYQAFGHDDRRWRIVEQRANALPKKSSRKTRLLLLKDFEGEALTDESIDEFADRQLHESSWLAKVTTQWLSSLGSDVYVSRGSLTAELRRRWGLDTVIPQVRFESGMPVVDEEGAEITPEEFEKFRLQWEGHRVTREMRTDRRPDKRIDHRHHLVDAIVTALTSRSLYQQYAKAWKVADEKQRHGRVDVKVELPMPILTIRDIALEAVRSVRISHKPDRYPDGRFFEATAYGIAQRLDERSGEKVDWLVSRKSLTDLAPEKKSIDVDKVRANISRIVGEAIRLHISNIFEKRVSKGMTPQQALREPIEFQGNILRKVRCFYSKADDCVRIEHSSRRGHHYKMLLNDGFAYMEVPCKEGILYGVPNLVRPSEAVGIKRAPESGDFIRFYKGDTVKNIKTGRVYTIKQILGDGGGKLILTPVTETKPADLLSAKWGRLKVGGRNIHLLRLCAE

SEQ ID NO: 280 - protein, 1146 aa, Alicyclobacillus hesperidum
MAYRLGLDIGITSVGWAVVALEKDESGLKPVRIQDLGVRIFDKAEDSKTGASLALPRREARSARRRTRRRRHRLWRVKRLLEQHGILSMEQIEALYAQRTSSPDVYALRVAGLDRCLIAEEIARVLIHIAHRRGFQSNRKSEIKDSDAGKLLKAVQENENLMQSKGYRTVAEMLVSEATKTDAEGKLVHGKKHGYVSNVRNKAGEYRHTVSRQAIVDEVRKIFAAQRALGNDVMSEELEDSYLKILCSQRNFDDGPGGDSPYGHGSVSPDGVRQSIYERMVGSCTFETGEKRAPRSSYSFERFQLLTKVVNLRIYRQQEDGGRYPCELTQTERARVIDCAYEQTKITYGKLRKLLDMKDTESFAGLTYGLNRSRNKTEDTVFVEMKFYHEVRKALQRAGVFIQDLSIETLDQIGWILSVWKSDDNRRKKLSTLGLSDNVIEELLPLNGSKFGHLSLKAIRKILPFLEDGYSYDVACELAGYQFQGKTEYVKQRLLPPLGEGEVTNPVVRRALSQAIKVVNAVIRKHGSPESIHIELARELSKNLDERRKIEKAQKENQKNNEQIKDEIREILGSAHVTGRDIVKYKLFKQQQEFCMYSGEKLDVTRLFEPGYAEVDHIIPYGISFDDSYDNKVLVKTEQNRQKGNRTPLEYLRDKPEQKAKFIALVESIPLSQKKKNHLLMDKRAIDLEQEGFRERNLSDTRYITRALMNHIQAWLLFDETASTRSKRVVCVNGAVTAYMRARWGLTKDRDAGDKHHAADAVVVACIGDSLIQRVTKYDKFKRNALADRNRYVQQVSKSEGITQYVDKETGEVFTWESFDERKFLPNEPLEPWPFFRDELLARLSDDPSKNIRAIGLLTYSETEQIDPIFVSRMPTRKVTGAAHKETIRSPRIVKVDDNKGTEIQVVVSKVALTELKLTKDGEIKDYFRPEDDPRLYNTLRERLVQFGGDAKAAFKEPVYKISKDGSVRTPVRKVKIQEKLTLGVPVHGGRGIAENGGMVRIDVFAKGGKYYFVPIYVADVLKRELPNRLATAHKPYSEWRVVDDSYQFKFSLYPNDAVMIKPSREVDITYKDRKEPVGCRIMYFVSANIASASISLRTHDNSGELEGLGIQGLEVFEKYVVGPLGDTHPVYKERRMPFRVERKMN

SEQ ID NO: 281 - protein, 1552 aa, Anaerophaga sp.
MFSQRNNPYCELLQNVKQLYKEKFGKTNQVDNSIIYGFMKRILGLDLGTNSIGWALVENDENDRKGKIIGMGSRIIPMDMSELDNFNKGASISKTAERTRLRMTRRLRERHLLRRARLHRILNIMGFLPEHYRNSIDFIDKKGCFFEGQEPKIAYKPDKNSEQFCFLFTSSFHEMLEDFRKFQPELIQNRKKVPYDWTIYYLRKKALTQKISKEELAWIILNFNTKRGYYHLRGEDEDNQDNKKIKEFRALKVVNVTEREGANSSGKKWYDMELENGWVYSRQSNLPPNLEGKTIELIVSYTLDNNGNIKKDKNGKEKYSLSMPGEEDWNLVKIKTENDLKTSKKSVGEYIYDHLLKNPDQKIRGKLISTIERKFYKEELSRILKTQMNFYEELKNRELYQKCVEELYPNNKSHQQTLLQKDFIHLIVEDIIFYQRPLKSKRAFVNNCPLEYRVYVDKKSGELIKSGVKCIPKSHPLFQEFRLWQYVRNLRIYERERMVNGRLMVNVDVTNELLPDEEHIVRLFDLLNDRKSFKQDDVLRFVGIKSPKDRKRYSWNYPEDKELPGNETRHLILAWLKKVDGVPEDWLDPEKLKALWHLLYSVTDREEIIKGLHSFAKKYELPDTFVEHFKKIPRLEREYGSFSEKAIKKLLPLMRMGKYWKAEEIPADLLEKAQKIIDAEADDRISDEVREKLLHLKDISQLKGLPLWQASYLVYGRHSETGEVVKWRTSEDLEKYILQFKQHSLRNPVVEQVILEALRVVKDIWEHYGEGKEGFFNEIHVEIGRELKNPADKRKKITSQIQENENTNLRIKALLEELFNDPSVKNVRPYSPAQQEILRIYEDGVLNGQKEIPDDILKISKMARPSKSQLVKYKLWLEQKYRSPYTGEIIPLSQLFTSAYEIEHIIPQARYFDDSFSNKVICEAEVNREKGHQLAFEFITKRGGDEIELNFGKKVTILNVEEYQKFVKDHYGRSLRSLSKMRKLLMEDIPDDFIDRQLNDSRYISKVVRNLLSNIVRAEDENSLVSKHLITCTGGVTTRLKHEWGLNDVWNELITPRFVRLNKMGKEKFGEWINKKGKQVFQIQMPLELQKGFNKKRIDHRHHALDALVVACASRSHVNYLNNDSARANASETRYDLRNKLCYKDKTDSNGNYRWKFYKPWESFTEEAKNRLAGTVVSFKSNRRIMTRSSNRYFKWVDTSEGKKKKLVRQIKGDNQAIRKPLHKDTVLGKVSLRKEKKVSLSKAIDLWESIVDKPLKKRIQSLREQGYDKKLLLKYFKDRNNQFNGQDISRVNIYFFDNNLAARRVTLDASFNSEKRIDGITDSGIKKILYAHLQNEKYHGKKDEKGNEISPYELAFSPEGLEEMNANIKKLNGGKPHCPIYKVRLAETIGEKFKLGEKGNKNKKYVEAAKGTNLFFAVYVDEKGVRSFETIPFSVALERRKQKLAVVPEENENKEKLLFYLSPNDLVYVPDEDEKLIDYRQLSINPTRIYKMVSSSGTQCFFIPHFVASPIVQTMELGPNNKSERAWDGQMIKNVCYKLSVDRLGNVKIEK

SEQ ID NO: 282 - protein, 1515 aa, Anaerophaga thermohalophila
MKRILGLDLGTNSIGWALVESDEEQKSGKIQGIGSRIIPMDQNELDNFNKGNTVSQTAERTRLRMVRRLRERHLLRRERLHRVLKEIGFLPEHYLEQIDFTEKPGGFLPGKEPKIAYKPDNFKDKYDFLFQDSYHEMLSDFQDKNPEFIQKRKKVPQDWTIYYLRKKALTAKITKEELAWIILNFNQKRGYYQLRGEDEDVAKNTKKEEFHALKVVKVKEREDSEGASGKWYDIELENGWVYPRQSNIRPDWEGKILELIVTYNLDKDGNIKTDKEGNEKRSFRMPNKDDWTLRKKRTENEIEKSGKTVGEYIYDNLLDAPDLKIRGKLVSTIERKYYRSELEQILTAQKKYHPELSNSELFNKCISNLYPNNDIHRKALLSKDFVHLIINDIIFYQRPLKSKRSTVSNCPLEYRVYVDKVTGEKKKVPLKCIPKSHPLYQEFRLWQYVKNLRLFEKERFENGRLLTNVDVTEQFLPDEDKYVELFEFLNGRKTFKQDDILKFAGIKSAKDRVKYYWNYPQEKEYPGNETRYLIESRLKKIENVPDEWLNYEKIEELWHLLYSVTDKVEIEKGLQSFAAKYQLPDLFVEVFKGFPRMEREYGAFSKKAIKKLLPLMRMGKYWKLENINPDLIEKVQKIIDGEADDNINDGIRERFSEINEMSDLRGMPLWKASYLVYGRHSEAAEVIRWRTSADLDQYIKDFKQHALRNPIVEQVVLEALRVVKDVWNYFGEGREKFFDEIHVEIGRDLKNPADKRQKIANQIQENENTNLRIKALLVELFNDPEVQNVRPYSPVQQQLLKIYEDGVLNAERDIPDDIQKISRMANPTRNQLIRYKLWLEQKYRSPYTGEIIPLNKLFTSEYEVEHIIPRARYFDDSFSNKIISEAEVNRKKDRMLAFEFIKKLGGSTIDLNYGKKVSVLTVEEYQQFVKDHYGINPHSRLKMQKLLMDEIPESFIERQLNDSRYISKMVRNLLSNIVREENENSPVAKQLITCSGSITNTLKQEWGLNDVWNTIITPRFERLNKMGEQKYGEWVNKEGKPVFQIQMPLELQKGFNKKRIDHRHHALDALIVASATRSHVNYLSNEAAKTNAKDTRFDLRNRLCYKEKRGQNRNFTWRFYKPWNTFTEDAKNALNDIVVSFKSNHRVINKSTNRYFKWENLPGGMKKKRLVRQEKGDNWAIRQSLHKDTVLGKVSLRKVKPVSLSVALDSWNNIVDKALKKKIRSLKDQGYDKKLMLKYFKDRRNEYNGENISRVNVYYFDEEMAARRVDLDTSFNSEKRIEGITDSGIKKIIYAHLKNEKYHGQKDDKGKDISPYELAFSPEGIAEMNANIKQLNGGKPHCPIYKVRLAEPVGEKFQLGETGNKTEKLVEVAKGTNLFFGVYANDEGVRSFATVPFYLAVEREKQGLPAVPQENENGDQLLFWLSPNDLVYVPSEEDAHFANPKQIELDNSRIYKMVSSTGTQCFFIPHFVATPIVQTIELGPNNKSERAWDGQMIKKVCYKLSVDRLGNVEIE

SEQ ID NO: 283 - protein, 333 aa, Bacillus cereus
MMNPNNFTKEDFWRTIILYGLNQATYKIALGQSLIRFSEQQRNVVSMNELAEDFFDMYLERLKNGKPQLATPNRQTAMERIINSYNIGRLTRSQAIEKVEREAFNDVIDRFHTVDSLQVPMKFYEKTDKGIVIFDNVFEIFSDNNNFELRNELDARWDLLESAFEIKRTDSQLVNDIRKLYLANGYERTDITKNRSVLNGYQSNVCFYCGELMSDDDVHVDHVIPRQLINHDDIWNLVLSHGFCNQQKSDNLPDVNYIEKLIERNEYFIKSNHPISNKLKERLGNTPRRRRTTIDRIYEHAKLVLAPWKGIYGYNPATDPFYKTFIRNIVLSK

SEQ ID NO: 284 - protein, 1068 aa, Bacillus cereus
MRYVLGLDIGIASCGWAVINQEKERIEDLGVRIFDKAENPKDGKSLAAPRRDARSTRRTLRRKKHRMQRIKILLVKQGLLFKTELNHLYESATEFDVWNLRLDALERKLHPKEFARVLIHLAKRRGFKSNRKETTLSENGQILESISENQQIMEQQNYRTVGEMILKDKKFENHKRNKDGTYIGTVTRQQLQDEIQMIFHTQRLYKNDYATEEFESSYLEIWASQRPYASKDQIEKMIGYCTLEPKEKRTPKASWSFQYFVALQTINNLRLISKDKIEELSFEEKKQIMNLALEKPIVKYIDIRKLLSIPNDFQFNSLSYSADTVDTTLENKRCIELKEYHSINKVYKQVYGKNTPNLLPIDYDTIAYGLTIFKDDKDILEYLQNKYVNAKGKPIKNLAKKTYDDTFIQALLNLNFTKMGHLSFKALKNIIPFLEEGLSYDKACEKAGYNFKGTSYTERTKYLPVIPQNTNPVVHRALSQTRKVINAIIKKYGSPNAIHIETARELSKTFQERKEIDSRYQDNSKKNEHAIHKLKELGNINPSGINIVKFKLWSEQDGRCMYSGKYIEPHRLFEEGYTEVDHILPYSRSLDDSYNNKILTLGTENQRKGNKTPYEYMGNTSIWDEFETRVQSNKKINFKKQQKLLLQNFSYAREQEFIERNLNDTRYATIYLTSLIQQHLIFSESSSKKKVRTVSGIITSHLRSRWGFNKDRKEGHIHHALDAVIVAVTSNHMIQRVTKYYKLKELNKNLQAKQLPFPEPWEGFRLELEARISPNTQQYLKGIHFKNYADVNLSDIKPIFVSRMPKRSITGELHQETIRKFLGYNEKGKVLTAIKTKLEDIPFDANGDFPMYGKETDLYTYNAIKERYLSHEKDKRKSFQEPLYKPTKSGEIGPLIKSIKIMDTRTIVNPVNQGKGVVYNSKIARTDVFKKEDKYYLIPIYTIDLLKNILPHKAITAGKGYEDWTTIDSSFTFLFSLFPNDLIQIVPSKNKTIKARTTVSKKEILLPSLTGYFKGVHSGTAGITVETHDGSVIANVGSKQLLLFEKYQVDVLGHYTKIKEEKRMGMAI

SEQ ID NO: 285 - protein, 1078 aa, Bacillus cereus
MRYVLGLDIGIASCGWAVINQEKERIEDLGVRIFDKAENPKDGKSLAAPRRDARSTRRTLRRKKHRMQRIKVLLVKHGLLSKTELDHLYESATEVDVWNLRLDALERKLYPKEFARILIHLAKRRGFKSNRKETTLSENGQILESISENQQIMEKQNYRTVGEMILKDKKFENHKRNKNGTYVGTVTRQQLQDEIQMIFHAQRLYKNDYATEEFESSYLEIWASQRPYASKDQIEKMIGYCTLEPKEKRAPKASWSFQYFVALQTINNLRLISKDRIEELSFEEKKQIMNLALEKSIVKYIDIRKLLSVPNEFQFNSLSYSADTVDTAVESRKCIELKEYHSINKVYKQIYGENALNLLPKYYDTIAYGLTIFKDDKDILEYLQNKYVNAKGKPISNFANKTYDDTFIQALLNLNFTKMGHLSFKALKNIIPFLEEGLSYDKACEKAGYNFKGTSYTEQTKYLPVIPQNTNPVVHRALSQTRKVINAIIKKYGSPNAIHIETARELSKTFQERKEIDSMYQDNSKKNEHAIHKLKELGNINPSGINIVKFKLWNEQDGRCMYSGKYIEPHRLFEEGYTEVDHILPYSRSLDDSYNNKTLTLGTENQRKGNKIPYEYMGNTSIWNDFETRVQSNKKINKKKQQKLLLQHFSYAREQEFIERNLNDTRYATIYLSSLIQQHLIFSESSRKKKVHTVSGIITSHLRSRWGFNKDRKEGHIHHALDAVIVAVTSDHMIQRVTKYYKLKELNRNLQAKRMPFPEPWEGFRLELEARISPNTQQYLKGLRFKNYADVNLSEIKSIFVSRMPKHSITGELHQETIRKFIGYNEKGKVLTAIKTKLEDIPFDANGDFPMYGKESDLYTYNAIKERYLSHKKDKRKSFQEPLYKPTKSGGIGPLIKSIKIMDTRTIVNPVNQGKGVVYNSKIARTDVFKKEEKYYLIPIYTIDLMKNILPQKAITAGKGYEDWTTIDPSFTFLFSLFPNDLIQIVPSKNKTIKARTTVSKKEVLLPSLTGYFKGVHSGTAGITVETHDGSVIANVGSKQLLLIEKYQVDVLGNYTKIKEEKRIGLTTYNDNKKIAAC

SEQ ID NO: 286 - protein, 1088 aa, Bacillus smithii
MNYKMGLDIGIASVGWAVINLDLKRIEDLGVRIFDKAEHPQNGESLALPRRIARSARRRLRRRKHRLERIRRLLVSENVLTKEEMNLLFKQKKQIDVWQLRVDALERKLNNDELARVLLHLAKRRGFKSNRKSERNSKESSEFLKNIEENQSILAQYRSVGEMIVKDSKFAYHKRNKLDSYSNMIARDDLEREIKLIFEKQREFNNPVCTERLEEKYLNIWSSQRPFASKEDIEKKVGFCTFEPKEKRAPKATYTFQSFIVWEHINKLRLVSPDETRALTEIERNLLYKQAFSKNKMTYYDIRKLLNLSDDIHFKGLLYDPKSSLKQIENIRFLELDSYHKIRKCIENVYGKDGIRMFNETDIDTFGYALTIFKDDEDIVAYLQNEYITKNGKRVSNLANKVYDKSLIDELLNLSFSKFAHLSMKAIRNILPYMEQGEIYSKACELAGYNFTGPKKKEKALLLPVIPNIANPVVMRALTQSRKVVNAIIKKYGSPVSIHIELARDLSHSFDERKKIQKDQTENRKKNETAIKQLIEYELTKNPTGLDIVKFKLWSEQQGRCMYSLKPIELERLLEPGYVEVDHILPYSRSLDDSYANKVLVLTKENREKGNHTPVEYLGLGSERWKKFEKFVLANKQFSKKKKQNLLRLRYEETEEKEFKERNLNDTRYISKFFANFIKEHLKFADGDGGQKVYTINGKITAHLRSRWDFNKNREESDLHHAVDAVIVACATQGMIKKITEFYKAREQNKESAKKKEPIFPQPWPHFADELKARLSKFPQESIEAFALGNYDRKKLESLRPVFVSRMPKRSVTGAAHQETLRRCVGIDEQSGKIQTAVKTKLSDIKLDKDGHFPMYQKESDPRTYEAIRQRLLEHNNDPKKAFQEPLYKPKKNGEPGPVIRTVKIIDTKNKVVHLDGSKTVAYNSNIVRTDVFEKDGKYYCVPVYTMDIMKGTLPNKAIEANKPYSEWKEMTEEYTFQFSLFPNDLVRIVLPREKTIKTSTNEEIIIKDIFAYYKTIDSATGGLELISHDRNFSLRGVGSKTLKRFEKYQVDVLGNIHKVKGEKRVGLAAPTNQKKGKTVDSLQSVSD

SEQ ID NO: 287 - protein, 1069 aa, Bacillus thuringiensis
MNYDIGLRIGITSCGWSIINKDLERIEDLGVRVFEKAENPDGTASAAPRREARKSRRKHRRKKHRIERIKRLIVQHDLLSKKELDSLYLSPFNIDVWNLRVEALERKLDNREFARVLIHLVQRRGFQTIRKSVEIQEEGKLLENVSENERIMKVNGYKTVGEMFSKHEKFTHHKRNKDGSYTSVVTRSLLLKEIKTIFNSQRILGNVFSTQKLESDYLYIWGSQRPTLTYEQLMSMVGNCIYEKKEKRAPKTSWAFQYFSLLQKINKLKVSDDNTLRKLSKEERDIVIELAFKKKNVSFVDIRKALKLNDNTKFNHLTYSHVVETKKVEKATFIELKGYHLIKKQLKDRNVELTQELQPKDYDAIAAASTFFKNDIEFRDYLRNQYLDSNGKRKSNIANKVFEDKVIAAVFELNFSKVCHLSFKSLYKLIPHLEKGLDYKEAILCAGYNFRDENKRDKKLFLPVIQQETNPVVHRALTQARKVINAIIREYGSPNTIRFVVANDLAKTYKQRKELESTLKKNRAENEKIKTKLLSMGIINPTGMDIVKYKLWYEQSGICLYTGRQMELSSLFKPGYSIVNHIIPYNRSFDDTYHNRVLTLTETKYEKGNKIPFEYFGAEETCWNEYEKRVSTSKKIHDKKREKLLIRNFDIEYENEMISNNVFDTHYIGSYFEKYIDEHLQFKKSTKKQKVFSIHGNMVAHLHSRWGFNKNSREIYLNHAVDAAIVAVLTDQLIRNIADYYRRDNILEQKGSLKFPEPWKSFSIELEARISPQVRDLIKKLNLDSYLDVDILHIKPVFISKKPRRKVNGEAHKSTIRSLIGINEIGKTVTCIKTRLEDIPFDENGDFPMYGKDTDKYTYTAIKERYLEFNKDKEKAFSTPLYKLKRNGEPGNQIKSVKIIDTRNIVNKVNQGKGIAYNSNIIRVDVFSRDQKYYVVPIYLRDFIKGSLPNKIITAAKGFMQWPETDNSYTFLFSIFPNDLIKVVPKEGKFIKAKNENKENINLTEILGYFKGLDSSTGAFTLESHDGSLLARGIGTKNLLLIEKYQVDVLGRYNKVGNEERQDIKIQQN

SEQ ID NO: 288 - protein, 206 aa, Bacteroides cellulosilyticus
MKKILGLDLGCNSIGWALVNEAENTEEISSIIKLGVRVNPLTVDEMQNFEKGKSITTNADRTLKRSMRRNLQRYKLRRDTLIEVLKEHGFITDSTLLSEHGNKTTFETYRLRAKAAVEEISLEKFARVLLMINKKRGYKSSRKAKGSEDGVLIDGMDVARKLYEEGLTPGELCLQILEAGKKNLPDFYRSDLQNEFDRIWNFQKLV

SEQ ID NO: 289 - protein, 349 aa, Bacteroides coprosuis
MKKILGLDIGTNSVGWAVVNTNQEGEPSQIEKLGSRIIPMSQDILDKFGQGQTVSSTASRTDYRGIRRLRERSLLRRERLHRVLHILDFLPKHYADSIGWDPRNSKTYGKFLPGTEVKLAWVPTADGHQFLFYSTYLEMLEDLKQTQAQLFETSQTPVPLDWTIYYLRKKALTQPITKHELAWLLLHFNTKRGYYQRRGELEDTPTDKLVEYHALKVVDVEVDPEDQSKKPWYFVHLENGWIYKRQSSEPLDNWKGLVKEFIVTTHLDKEGKPKLDKEGEVRRSFSSPKEDDWTLVKKKTENDLEKSGLTVGAYIYQTLLNKPNQKIRGGLIKHIERNYYVEELEQILR

SEQ ID NO: 290 - protein, 1504 aa, Bacteroides coprosuis
MKKVLGLDIGTNSVGWAVVNQNDKGEFLSIEKIGSRIIPMSQDVMDKFGAGQTESSTAQRTQYRGVRRLRERSLLRRERLHRVLHILHFLPQHYDAAIGWNKKENKTYGKFLPGVEVNIPWVATDQGHQFIFMDSYAEMLKDLKQHQPHLFEKSSTPVPLDWTIYYLRKKALTQAISKEELAWILLNFNQKRGYYQLRGEEVEDNTKREEFYALKVVKVELDKDNTSAKTWYKVHLENGFIYPCPSDTPIDSWVGMVKDFIVTTTLEKDGSEKRTADGEIKRSFRAPKEDDWTLLKKKTESELEKSGKQVGAFIYDTLLSNPDQKIIGGLIKTIERKYYKKELEQILETQQKFIAELSDKKLFQACAEELYPLNDSHRENLLERDFKHLFVQDIIFYHRPLKTKKSLISNCTYEYRTFYKNGEKQISPIKCIAKSNPLFQEFRVWQFVQNLRILQRQRSEGDSIKYNVDVTAEFLKDENDIANLFTWLNERKVIKQDQLLKSYFKLKVNKETKELDYRWNYVDDKNKEYPCNATRTHILSFLEKCKEEKRIEDDRFVYSLWHLLYSVVEPIELRGALAKFAEREHLHPSFVDVFAQFPPLEKEYGSYSEKAIKRLLPLMRMGDYWHEDKIDVKTKQRIQRIIDGEADDDITHRSREKVENLRSITDFKGLPLWKAGYVVYNRHSESGELTKWKTPHELSNYIQNEFKQYSLRNPIVEQIVLETLRVVHDLWVKHGDFSEIHLELGRDIKNSSDKRKRMAERQQENENSRQRVLEMLIDLKKEAAFADLNPYSPSQQEKLRIVEDGVLRSNIEIPKDIEKITKSAKPTSRELTKYRLWLDQKYRSPYTGQPISLAQLFTSKYEIEHVIPQAKYFDDSFTNKVICESEVNKEKGSMLAHEFILKNGGSTVNVGGRQVQVLKNDAYVELINRLYGKNNPVKAKKLLAEDIDEVVGDFSERQLNDTRYISRVVQKLLSNIVREEDEQESTSKHVIGCSGQVTTALKKDWGLNDIWNKIIQPRFERLNEMTATEDYGVWQSPNHFQIRVPEEIQKGFTKKRIDHRHHAMDALVIACATRSHINYISNRSGQDRNAKFETTRTDLRSKLCYKENSSGNNYNYIFNKPWDTFTQDAHRALENIVVSHKQNLRVLTKTNNYTQFINKDGKKDLQKQVKGDHFAVRKPMHQETIYGRVSIRSIKEVALKKALENWKQIVDRTLKDKIRELIGAYGKYDAQTILKYFKDRDYKFNNLKINRVEVYEYDHNCAAVRKSIGDDLTIKQIERITDESIRKILMNHLSNYDDNLKEAFSPEGLMEMNKNIKELNGGKNHQPIYKVRLFEDLGSKFPLGVSHNNPDKYAIAAKGTNLFFGIYEDQEGKRMFDSIPLNIVIDRLKEKKSPVPETYNESKLKFHLSPNDLVYVPTDEEQKQPELVDVDHLSDEQKGRVYKAVSFTGNRAFFVNHRVSKVIHDYVEFGTKNKIENDDDKRSLKHICWKLKVNRLGEITDVKR

SEQ ID NO: 291 - protein, 1509 aa, Bacteroides eggerthii
MKTILGLDLGTNSVGWAVINSVIKEQAERIWIEMAGSRIIPMDAAVLGDFDKGNSISQTSERTRLRGARRLRERQLLRRERLHKVLNILGFLPNHYLEYIDFEKHPGKFLADAEPKLAWVKDEQGKYTFLFQAAFDEMLADFAIHQPSLVSGDKKIPYDWTIYYLRKKALTEMISKEELAWILLNFNQKRGYYQLRGEEEEDNAGKSVEFYALKVLTVEATDEKKGRDVWYNVHLENGWIYRRSSSVPLDWEGQVKEFIVTTDLNPDGTPKLDKYGEVKRSFRAPKEDDWMLIKKRTEADIANTHKTVGAYIYDTLLQKPQQKIIGKLVKTVERKLYRDELSLILQKQCAFHAELQDRALYARCVEALYPSNEVRRKNIANRDFVYLLMDDILFYQRPLKTKKSLIANCPYEENEYVDRETGEIKKTPLKCIAKSHPLFQEFRLWNFLSNIRIYQKEKEINGTLHLDVDVTAEFLKTEDDYVALFDWLNSRKEIEQKTFLKYPKFGLKKEISNYRWNYVEDKQYPCNETRHAILSSLEKANVCIDFLSNEKEVALWHILYSVSDKQEIEKALRTFAAKNGLDESFVEAFKKFPPFKSEYGAYSAKAIKKMLPLMRCGKYWDVSSIDDTTKERIKKIVTGEYDERISVKVRDKVMNLSDISCFRRLPLWLACYIVYNRHSEDKEAVKWESPADIDAYLASFKQHSLRNPIVEQVITETLRVVRDIWKQVGRIDEIHIELGREMKNPADKRKRMTAQILENENANLRIKALLAEFMNPEYEIENVRPYSPSQQEILRIYEDTVLHAEDQLPEEIDAILKKFNSSKVPTKSEFLRYKLWLEQKYRSPYTGELIPLGKLFTAAYEIEHVIPQSRYFDDSFSNKVICESAVNKLKDNQLGYEFIKNHHGQKVEVGFGKSVEIFSVDSYERFVKEQYAKSAVKMKKLLMDDIPEQFIERQLNDSRYISKVIKGLLSNIVREKNDSGEYEPEAVSKNIVVCTGSVTDRLKRDWGMNDVWNSIVYPRFERLNSLTDTQSFGHWENKSGKKVFQTELPLEYQKGFSKKRIDHRHHAMDAIVIACATRNHVNYLSNESASRNAKISRYDLQRLLCDKNRTDDNGNYKWVIKKPWDTFTQDAREVLSKIVVSLKQNLRIINKTTNVYRHLDATGNRVYEKQKTGDSWAIRKPMHKDTVFGAVNLRKVKVVRLSVALDTPAMIVDKRVKNKVFELLSYKYDKKRIEKYFKENAFLWKELDLAKVAVYYFTEATTEPLVAVRKPLDSTFNEKKIKESVTDTGIQKILLNHLCTKEGKPDLAFSAEGIEEMNRNLLQLNNGKSHQPIYKVRVYEPRGNKFSVGVLGNKGTKWVEAAKGTNLFFAIYITEDGKRTYETIPLNVVIEREKQGLVPVPDRNKKGDKLLFWLSPNDLVYLPTEEEREFGRINEPIDRGRIYKMVSCTGNEGHFIPANVANPIVPVIELGSNNKAQRAWTNEMIKDICIPIKVDRLGHIIEVKYRIDE

SEQ ID NO: 292 - protein, 1526 aa, Bacteroides faecis
MKKILGLDLGTNSIGWAVLNAADDNSLKYIEAAGSRIIPMDAAILGDFDRGNSISQTAERTRIRGMRHLRERYLLRRARLHRILNLLGFLPFHYAQDIDRYGNFSADMEPKIAWCKNLEGELEFIFIESFNEMLEDFRKNQPELVADNKKVPYDWVIYYLRKKALEKKISKEELAWILLNFNQKRGYYQLRGEDDDESMKTAKTRQYFDKQIIKNIIDTNQTYKGQRILIVELQNGDKGKIFKKEIPDWIGQEKNIIVTVDIDKDGNDKYEESGSLSCRFKIPTDAEWESEWKLIKMKTQKDLDESNKTVGTYIYDSILQNPTQKVRGKLVRTIERKYYKAELKQILEKQTEFHSELQDKDLYIECLNELYSNNDTHRNAITDRDFVYLFMNDILFYQRPLKSKKSLIDNCPYERNIYIDKETGEIKYSPIKCIAKSHPLFQEFRLWKFISSIRIYQRESVVEVVDKQLDLFSSQSTSVQKLVTDVDVTDKFLTCENDYVALFEWLNKKKIIDQKEFLKYRPFGLKGDIDNYRWNYVEDKSYPCNETHAMILTYFAKAGISEDILTKEMEEALWHILYSVEDRQEITKALRTFASKYHLSDSFVKVFSNIPPFKKEYGSYSAKAIKKLLSLMRMGKYWSEDAIDVNTRERIDKIVTGEYDEKIRDRVREKTIRLNDIRHFRALPDWLACYVVYDRHSETREITEWKSPEEIDEYIRNFKQHSLRNPIVEQVITETLRTVRDIWKQVGCIDEIHVELGREMKNPADKRKRITSQIIENENANLRVKALLTEFVNSEFEIENVRPYSLSQQDILRIYEDGVLNSVAEVPGDIAGILKKFNENDAKKRPTTSEILRYKLWLEQKYRSPYTGEMIPLSKLFTSAYEIEHVIPQSRYFDDSFSNKVICEAEVNKLKDNALGYEFIKKHHGEKVELGFGKIVEIFSVSVYEQFVKDNYSRNRGKMKKLLMDEIPEQFIERQLNDSRYISKVVKTLLSNVVREKAEQEAVSKNVIVCTGGVTDRLKKDWGINDVWNKIVLPRFLRLNELTNSTNFTAKNAAGNEIPAMPLELQKGFNKKRIDHRHHAMDAIVIACANRNIVNYLNNESASRKAKISRHDLQAILCDKVRTDDKGNYQWRVKKPWDTFTQDVYVALENIIVSFKQNLRVINKTSNYYWHYENGKKVLVKQVKGDSWAIRKPMHKDTVFGEVNLRKVKSVSLNEALKNPQFIVEKDLKRQLLSLLQQNFDIKKIKKYFEEHKDIWSDISLSKMNIYYFTKETKDRYFATRKPLDASFDKKKIESCITDTGIQQILLRHLELKENDPERAFSPDGIDEMNRNIIQLNKGKGHHPIAKVRVYEKADKFEVGQRGNKSSKFVEAAKGTNLFFAVYETEYPDEKTNSIVRKRNYATIPLNIAIERQKRGLSTAPEDEKGNVPSFVLSPNDLVYLPTSEDIVNGHITQPIDKSRIYKMVSSSGSQCFFIKHNIANIIVDKYEFSPLNKMERAISNEMIKEICIPVKVDRLGNIVKLGKSE

SEQ ID NO: 293 - protein, 1509 aa, Bacteroides fluxus
MKTILGLDLGTNSVGWAVINSVIKEQAERIWIEMAGSRIIPMDAAVLGDFDKGNSISQTSERTRLRGVRRLRERQLLRRERLHKVLNILGFLPNHYLEYIDFEKHPGKFLSDAEPKLPWVKDEQGKYTFLFQAAFDEMLADFAIHQPSLVSGDKKIPYDWTIYYLRKKALTEMISKEELAWILLNFNQKRGYYQLRGEEEEDNAGKSVEFYALKVLTVEATDEKKGRDVWYNVHLENGWIYRRSSSVPLDWEGQIKEFIVTTDLNPDSTPKLDKYGEVKRSFRAPKEDDWMLIKKRTEADIANTHKTVGAYIYDTLLQKPQQKIIGKLVKTVERKLYRDELSLILQKQCAFHAELQDRTLYARCVEALYPNNEVQRRNIANRDFVYLLMDDVLFYQRPLKTKKSLIANCPYEENEYVDRETGEIKKAPLKCIAKSHPLFQEFRLWNFLSNIRIYQKEKEINGTLHLDVDVTAEFLKTEDDYVALFDWLNSRKEIEQKTFLKYPKFGLKKEISNYRWNYVEDKQYPCNETRHAILSRLEKANVCIDFLSNEKEVALWHILYSVSDKQEIEKALRTFAAKNGLDESFVEAFKKFPPFKSEYGAYSAKAIKKLLPLMRCGKYWDVSSIDDTTKERIKKIVAGEYDERIAVKVRDKVMNLSDISCFKRLPLWLACYIVYNRHSEDKEAVKWESPADIDAYLASFKQHSLRNPIVEQVITETLRVVRDIWKQVGRIDEIHIELGREMKNPADKRKRMTAQILENENANLRIKALLAEFMNPEYEIENVRPYSPSQQEILRIYEDMVLHAEDQLPEEIDAILKKFNSSKVPTKSEFLRYKLWLEQKYRSPYTGELIPLGKLFTAAYEIEHVIPQSRYFDDSFSNKVICESAVNKLKDNQLGYEFIKNHHGQKVEVGFGKSVEIFSVDSYERFVKEQYAKSAVKMKKMLMDDIPEQFIERQLNDSRYISKVIKGLLSNIVREKNDSGEYEPEAVSKNIVVCTGSVTDRLKRDWGMNDVWNSIVYPRFERLNSLTDTQSFGHWENKSGKKVFQTELPLEYQKGFSKKRIDHRHHAMDAIVIACATRNHVNYLSNESASRNAKISRYDLQRLLCDKSRTDDNGNYKWVIKKPWDTFTQDAREVLSKIVVSLKQNLRIINKTTNVYRHLDATGNRVYEKQKTGDSWAIRKPMHKDTVFGAVNLRKVKVVRLSVALDAPTMIVDKRVKNKVFELLSYKYDKKRIEKYFKENAVLWKELDLARVAVYYFTEATTEPLVAVRKPLDSTFNEKKIKESVTDTGIQKILLNHLCTKEGKPDLAFSAEGIEEMNRNLLQLNNGKRHQPIYKVRVYEPRGNKFSVGVLGNKGTKWVEAAKGTNLFFAIYITEDGKRTYETIPLNMVIEREKQGLAPVPDKNEKGDKLLFWLSPNDLVYLPTEEELEFGRINEPIDRGRIYKMVSSSGNQCFFIPQSISNAIIPTKELGANNKAERSWDGAMIKNICIPVKVDRLGRIIEVKYRINE

SEQ ID NO: 294 - protein, 1436 aa, Bacteroides fragilis; identical to SEQ ID NO: 160

SEQ ID NO: 295 - protein, 1512 aa, Bacteroides nordii
MKNILGLDLGTNSIGWAVINSEEDGPIVKKRIELAGSRIIPMDAAVLGNFDSGVTKSQTAERTSFRSIRRLRERQLLRRERLHKVLQILGFLPEHYVNDIDFENHPGKIKRNTEPKLPWRKNSMGQFEFIFQDSFEAMLTDFATHQPVFVSEGKKVPYDWTLYYLRKKALTEGISKEELAWLILNFNQKRGYYQLRGEEEEEQSNKLVEFYALRVVKVEATDDKKGKDTWYNVHLENGWIYRRTSNIPLDWEGKVKEFIVTTDLNEDGTPKLDKYGEVKRSFRAPKEDDWTLIKKKTESDIANSHKTVGCYIYDALLQNPHQKIKGRLVRTVERKFYKEELRLILEKQLSFHPELQDRDLYRACIDALYVSNEAHKNNISGRDFVYLFIDDIIFYQRPLKTKKSLIDNCPYEENQYMDRETGEVKQAPIKCIAKSHPLFQEFRLWQFISNIRIYQRERVLDDGKLETDVDVTPDFLKTEDDYTTLFEWFNDRKEVDQKAFLKNPQFGLKKTFTEYRWNYVEDKSYPCNETRNAILNGLQKAGVSADFLSREVEEALWHILYSVEDKIEIESALRKFASKHDLDDRFADVFKKLPPFKKEYGAYSAKAIKKLLPLMRIGKYWELSNIDDKTKERIDKIITGEWDENIHDRVREKAIKLSDITDFKGLPLWLSCYVVYNRHSEARAIAKWESPEDIDSYLRLFRQHSLRNPIVEQVITETLRTVRDIWKRVGQIDEIHVELGREIKNPADKRAKMTAQIVENENTNLRIKALLAEFINSEYEIENVRPYSSNQQEKLKIYEDTVLNGVKEIPEDINTILKKFRESDLKKRPTKSDFLHYKLWLEQKYCSPYTGRIIPLGKLFTSAYEIEHIIPQAHYFDDSFSNKVICEAEVNGLKDKKLGYEFIKHNPGKMVEIGFGKPPVRIFSVEEYERFVKENYSGIKNKMNKLLMDDIPETFIERQLNDSRYISKVVKSLLSNIVREKDSNGEYEPEAISKNVIVCTGSVTDRLKRDWGVNDVWNSIIYPRFERLNELTGSQQFGCWENKEGKRVFQTAVPLEMQKGFSKKRIDHRHHAMDAIVIACATRNHINYLSNESASKKAKISRTDLQRLLCTKCRTDDNGNYKWIVKKPWPAFTQDIRKALENITVSFKQNLRVINKTTNYYVHFDESGKKVLEKQINGDSWAIRKPMHKDTVFGKVNLQKVKEVRLSLALDTPKMIVDKKLKEKVLQLYSYKYDKKRIDKYFKENASLWKDLNLSKVAVYYFTNDSTEPLVAVRKPLDTSFNAKKIKESVTDTGIQKILLNHLSNNQDDPNLAFSPDGIDKMNKNLTALNDGKYHQPIYKVRVCEPQGNKFSVGTSGNKTSKYVEAAKGTNLFFAVYQTEDGKRSYETIPLNVVIEREKLGWTPVPENNNNGDKLLFWLSPNDLVYVPTADELNNGMRLDNMDKGRIYKMISCSGPQCFFIPQNVSNAIIPVIELGANNKAEKSWNNEMIKVVCVPIRVDRLGCITQINNQK

SEQ ID NO: 296 - protein, 779 aa, Bacteroides oleiciplenus
MKEGNQYDVACEYAGYRHSKSSLTREEIDNKVLKNRLEILPKNSLRNPVVEKILNQMVNVVNAVIDTYGKPDEIRVELARELKKGAKEREELAKSIAQNTREHEAIRQLLQTEFGMMHVTRNDIIRYKLYEELKDNGYKTLYSDQYIPREKVFSKEIDIEHIIPQARLFDDSLSNKTLEYRAVNIEKGNKTAYDFVKEKYGNDGLRRYLNHCEALFKDKKTKLKKLKMEDQDIPDGFIDRDLRNTQYIAKKALSMLSEISRRVVATTGSITDELRKDWQLVDIMKELNLPKYEALGFVETFKDKDGRIIKKIKDWSKRNDHRHHAMDALTVAFTKDVFIQYFNNKNAFWMSGSKEHANITAIKNKYFEKGKALAPIPLELFRTEAKHHLENILVSIKAKNKVVTNNINRTKKKNGENLKLQQTPRGQLHLESIYGSYRQCIIRDEKVNASFDASKIANVSKSAYRNALLKRLEAYDNDPKKAFTGKNSLDKNPVYLDENKMEKVPDRVKIVEFETVYTIRKPIDPKLSIDKVVDARIRTLLKKRLEEYGGDAQRAFSNIEENPIWLNKEKGISVKRVAIRGISNAQALHDKKDKDGNPILDKEGKGIPTDFVNTSNNHHVAIYRKPVVDKMGQVILDENGSPRYELGEDVISFFEAVARVNLRQPVVDKDYKRSEGWQFLFSMKQNEYFVFPNEKTGFNPKEIDLLNPENYALISPNLFRVQKIGLNDYTFRHHLETSIQNNSNELKFITWIRCGKNGINGVIKVRVNHIGQIVSMGEY

SEQ ID NO: 297 - protein, 653 aa, Bacteroides oleiciplenus
MKKILGLDLGSSSIGWALVNEGANDEEKSSIIKLGVRVNPLTVDEAQNFEKGKSITTNADRTLKRGMRRNLQRYKQRREALVEVLKKHEFITAGTLMSEQGNKTTFETYRLRAKAVEEEISLEEFARVLLMINKKRGYKSSRKAKGDEDGVLIDGMDVAKKLYDEDLNPGELCLQLLEAGKKTLPDFYRSDLQDEFDKIWNFQKQFNPESFCDTAKEEVRGKNRTQTWTILSKYFVWTEGDSVWNNEEARTEERIKEYKLVGIKRTTKGYEQKLENYRWRVQALSEQLNPEIIAIVLQEINGQISASSGYLGAISDRSKELFFNHQTVGQSLMSELDKNPNGSLRNKVFYRQDYLDEFNTIWEKQSLYHKELTVELKKEIRDIIIFYQRRLKSQKGLISTCEFEQREIIVEKDGKRKTKIIGCKVIPRSHPLFQEFKIWQTLNDVEVYVADRRTKRKQDRKSTTLFSDTEDILLVEGKRYLYQEEKELLAKELFVRENMKKAEVLKLLFEDPKELDLNFKQIDGNRTGFALFSAYSKMIEKYGYESVNFKNSADEIIEKLQIIFADLGWNTELFSIDLSKDDKELEKQPYFRLWHLLYSFEGDNTPTGNGKLIEALMRLCSVEKEYASVLANVSFQEDYGSLSAKAIKKYYLI

SEQ ID NO: 298 - protein, 1436 aa, Bacteroides sp.
MKRILGLDLGTNSIGWALVDEAENKDERSSIVKLGVRVNPLTVDELTNFEKGKSITTNADRTLKRGMRRNLQRYKLRRETLMEVLKEHKLITEDTILSENGNRTTFETYRLRAKAATEKISLEEFARVLLMINKKRGYKSCRKAKGAEEGTLIDGMDIARELYNNNLTPGELCLQLLDAGKKYLPDFYRSDLQNELDRIWEKQKEYYPEILTEVLKEELRGKKRDAVWAICAKSFVWEEYYTEWNKEKGKTEQQEREHKLEGIYSKRKRDEAKRENLQWRVNGLKEKLSLEQLVIVLQEMNIQINNSSGYLGAISDRSKELYFNKQTVGQYQMEMLDKNPNASLRNMVFYRQDYLDEFNTLWEKQAEYHKELTGELKKEIRDIVIFYQRRLKSQKGLVGFCEFESRQIEVEIDGKKKIKTVGNRVIPRSSPLFQEFKIWQILNNIEVTVVGKKGKRRKQKDNSPTLFDGLDDTEQLELNGSRYLYQEEKELLAQELFVRDKMTKSDVLKLLFDNPQELDLNFKTIDGNKTGYTLFQAYSKMIEMSGHEPVDFKKTVEKVVEHVKAVFDLLNWNTDILGFNSNEELDNQSYYKLWHLLYSFEGDNTPTGNARLVQKITELYGFEKEYAIILANVTFQDDYGSLSAKAIHKILPHLKEGNRYDVACAYAGYKHSESSLTKEEIANKALKDRLTLLPKNNLRNPVVEKILNQMVNVINAIIDTYGKPDEIRVELARELKKNAKEREELTKFIAETTRKHEEFKILLQSEFGLTNVSRTDILRYKLYKELESCGYKTLYSNTYIPREKLFSKEFDIEHIIPQARLFDDSFSNKTLEARSINLEKGNKTAYDFVKEKFGESGADNSLDHYLNNIEDLFKSGKISKTKYNKLKMAEQDIPDGFINRDLRNTQYIAKKALSMLNEISRRVVATSGTITDKLRQDWQLVDVMKELNWEKYKALGLVEYFEDKDGRQIGRIKDWTKRNDHRHHAMDALTVAFTKDIFIQYFNNKNASLNSNTNEYAIKNKYFQNGRAIAPIPLREFRVEAKKHLENTLISIKAKNKVVTGNINKTKKRGGVNKYLQQTPRGQLHLETIYGSGKQYLTKEEKVNASFDMKKIATVSKSAYRDVLLKRLHENDNDPKKAFTGKNSLDKQPIWLDKEQTRKVPEKVKTVTLETIYTVRKEISPDLKVDKVIDAGVRKILTGRLNEYGNDAKKAFSNLDENPIWLNKEKGISIKRVTISGISNAQSLHVKKDKDGKPILDEDSRNIPVDFVNTGNNHHVAVYRRPVIDKRGQLVIDEAGNPKYELEEVVVSFFEAVTRANLGQPIIDKDYKTSEGWQFLFSMKQNEYFVFPNEKTGFNPKEIDLLDAENYGVISPNLFRVQKFAHKNYVFRHHLETTIKDTSSILKGITWIDFRSSKGLDAIVKVRVNHIGQIVSVGEY

SEQ ID NO: 299 - protein, 1510 aa, Bacteroides sp.
MKRILGLDLGTNSIGWALVDSEEQRILGMGSRIIPMDQGVLDTFSGGNPVETQTAARTAYRGTRRLRERALLRRERLIRVLNMMKFLPEHYASQIDFEKRLGQFFDEKEPKLAWKQNDEGRFEFIFQQSFNEMIEEFKNKGVVREDKKIPYDWTIYYLRKKALSQEIEKEELAWILLNFNQKRGYYQLRGEEEEENPNKLVEYYSLKIVDVIADEKPNSKGDIWYSLHLENGWIYRRSSKIPLFGWKDKTRDFIVTTDLNDDGTVKKDKEGIEKRSFRAPSENDWVLLKKKTESDIEKSHKTVGAYVYETLLQNPMQKVRGKLVRTIERKFYKDELKQILEKQREFHPELRDEDLYNDCVRELYRSNETYQFILSKRDFVHLFLDDILFYQRPLRSQKSAIGDCILEFKTYKDKDGNNIKEYLKVISKSNPLYQEFRIWQWLYNLKIYRKEDDEDVTLQFIANIEDKEQLFDFLSNRKSIEQKPLLEYLIKAKGLKKQVKTEAYRWNYVEDKIYPCSETKTMISTRLAKVENIPDNFFTKEIEQKLWHIIYSVTDKNEFEKALRTFAKKYDLDIASFVDNFKKIPPFKNEYGSFSEKAIKKLLPLMRLGKYWKWNDIDNNTQNRISKIITGEYDEEIKDIVREKSIALTNENDFQGLQLWLAQYLVYGRHSEADIAGKWHSVADLEKYLNEFKQHSLRNPIVEQIITETLRVVRDIWRKYGQGAENFFSEIHVELGRDMKNTADERKKIVNVVTENENTNLRIKALLMELKNNSDGKLEVENVRPYSPTQQDILKIYEEYAISTGLDNEKDEKVKEDIKKISRVAQPTTTELQRYKLWLEQKYCSPYTGKVIPLGKLFTEEYQIEHIIPKSRYYDDSFSNKVICEAAVNKLKDKCLGLEFIKNYHGQIVETGFGQKVTIFDEEAYQNFVKQHYAYNRSKRTKLLLEEIPEKMIERQMNDTRYISKFVLPLLSNLVRAEENDNGVNSKNVLPVNGKITTMLKQDWGLNDVWNDLILPRFVRMNELAKTIAFTSWNEQHQKYLPTVPLELSKGFQKKRIDHRHHAMDALVIACATRDHVNLLNNKHANTDTIRYDLQRKLRLFERVTYIDPQTKNNVTKDIPKEFKKPWDNFTVDARNELEKIIVSFKQNLRIINKATNIYTKYENGKKIKVGQKGLNWAIRKPLHKETVFAKVSLRKRKTVRLSEALKDWKKIVDKKLKQEIKRLTCQYGKFDVDTILRYFKDRKYQFGEVDVSKVKMYYFDEENAAVRKNVDTSFTEKFIQGSVTDTGIQKILLNHLEAKGNKVEIAFSPEGIEEMNKNIIQLNEGKLHLPIFKVRVYETIGNKFSVGVKGNKKDKYVEAAKGTNLFFAIYVDENGIRSYETIPLNIVIERLKQGLSVVPEKNRKEHSLLFYLSPNDLVYVPIEDERENIHAVNLDQLNNEQRKRIYKMVSCTGSECHFVPYYVASPIVNKVEYSSLNKIGRSLTGEMIKDVCIKLKVDRLGNVKGISGL

SEQ ID NO: 300 - protein, 1436 aa, Bacteroides sp.
MKRILGLDLGTNSIGWALVNEAENKDERSSIVKLGVRVNPLTVDELTNFEKGKSITTNADRTLKRGMRRNLQRYKLRRETLTEVLKEHKLITEDTILSENGNRTTFETYRLRAKAVTEEISLEEFARVLLMINKKRGYKSSRKAKGVEEGTLIDGMDIARELYNNNLTPGELCLQLLDAGKKFLPDFYRSDLQNELDRIWEKQKEYYPEILTDVLKEELRGKKRDAVWAICAKYFVWKETYTEWNKEKGKTEQQEREHKLEGIYSKRKRDEAKRENLQWRVNGLKEKLSLEQLVIVFQEMNTQINNSSGYLGAISDRSKELYFNKQTVGQYQMEMLDKNPNASLRNMVFYRQDYLDEFNMLWEKQAVYHKELTEELKKEIRDIIIFYQRRLKSQKGLIGFCEFESRQIEVDIDGKKKIKTVGNRVISRSSPLFQEFKIWQILNNIEVTVVGKKRKRRKLKENYSAIFEELNDAEQLELNGSRRLCQEEKELLAQELFVRDKMTKSEVLKLLFDNPQELDLNFKTIDGNKTGYALFQAYSKMIEMSGHEPVDFKKPVEKVVEYIKAVFDLLNWNTDILGFNSNEELDNQSYYKLWHLLYSFEGDNTPTGNGRLIQKMTELYGFEKEYATILANVSFQDDYGSLSAKAIHKILPHLKEGNRYDVACVYAGYRHSESSLTREEIANKVLKDRLMLLPKNSLHNPVVEKILNQMVNVINVIIDIYGKPDEIRVELARELKKNAKEREELTKSIAQTTKANEEYKTLLQTEFGLTNVSRTDILRYKLYKELESCGYKTLYSNTYISREKLFSKEFDIEHIIPQARLFDDSFSNKTLEARSVNIEKGNKTAYDFVKEKFGESGADNSLEHYLNNIEDLFKSGKISKTKYNKLKMAEQDIPDGFIERDLRNTQYIAKKALSMLNEISHRVVATSGSVTDKLREDWQLIDVMKELNWEKYKALGLVEYFEDRDGRQIGRIKDWTKRNDHRHHAMDALTVAFTKDVFIQYFNNKNASLDPNANEHAIKNKYFQNGRAIAPMPLREFRAEAKKHLENTLISIKAKNKVITGNINKTRKKGGVNKNMQQTPRGQLHLETIYGSGKQYLTKEEKVNASFDMRKIETVSKSAYRDALLKRLYENDNDPKKAFAGKNSLDKQPIWLDKEQMRKVPEKVKIVTLEAIYTIRKEISPDLKVDKVIDVGVRKILIDRLNEYGNDAKKAFSNLDKNPIWLNKEKGISIKRVTISGISNAQSLHVKKDKDGKPILDENGRNIPVDFVNTGNNHHVAVYYRPVIDKRGQLVVDEAGNPKYELEEVVVSFFEAVTRANLGLPIIDKDYKTTEGWQFLFSMKQNEYFVFPNEKIGFNPKEIDLLDVENYGLISPNLFRVQKFSLKNYVFRHHLETTIKDTSSILRGITWIDFRSSKGLDTIVKVRVNHIGQIVSVGEY

SEQ ID NO: 301 - protein, 1424 aa, Bacteroides sp.
MKRILGLDLGTNSIGWALVNEAETDEEVSSIIRLGVRVNPLTVDETQNFEKGKSITTNAERTLKRSMRRNLQRYKLRRDALVEFLKELGFITDETILSEQGNRTTFETCRLRAKAAEEEISLEELSRVLLMINKKRGYKSSRKVKKEEDGVLIDGMEIAKKLYEEDLTPGQLCSQLLESGKKVLPDFYHSDLQEELDRIWSVQKQFHPDVFCDAAKEEIKGKNRSQTWAILANYFVWKEEVVGWNDREAKNETIEKECKLVGLKRTTKGYELKKENYRWRAQALTEQLGLEEIAVVLQEINGQINASSGYLGAISDRSKVLYFNHQTVGQYQMAELDKNPHASLRNMVFYRQDYLDEFDRIWEKQAEFHKELTAELKKEIRDMIIFYQRRLKSQKGLISFCEFERLEIVVEKDGKKQTKVIGCKVIPRSHPLFQEFKVWQTLNDIKVLGREKKRNALSASESRALYPEEKEILARELAIKENMKKADVLKLLFENPQELDLNFKQIDGNRTGFSLFSAYSKMIEKYGYEPLDFKKPADEIIGQLRTIFTDLGWNTNLFTIDLTKEGKELEMQPYFRLWHLLYSFEGDNTSTGNGKLIEKIMQLCGVEKEYAVELASLSFQDDYGSLSAKAIKRILPYLKEGNLYDVACEYAGYRHSKSSLTKEEIENKVLKGKLEVLPKNSLRNPVVEKILSQMVNVINTIIDTYGKPDEIRVELARELKKSAKEREELTKAIAKSTREHEEIRKLLQDEFGMMNVSRNDIIRYKLYEELKDNGYKTLYSNQYIPKEKIFSKEIDIEHIIPQSRLFDDSLSNKTLEYKAINIEKGNKTAYDFVKEKYGEEGLQQYINRCESLFNDKKAKLRKLKMEQKDIPDGFIDRDLRNTQYIAKKALAMLNEICRRVVATTGSITDQLREDWQLVDVMKELNLPKYEALGFVETYEDKDGRKIKRIKDWTKRNDHRHHAMDALTVAFTKDAFIQYFNNKNAAQDSGNRNHTNIIGIKTRYFDKGRALPPIPLEQFRIEAKQHLEKLLVSIKAKNKVVTVNVNRTKKRKGENTKIQQTPRGQLHLETVYGSHKQYVTKIEKVNASFDAAKIATVSKRAYRNALLKRLETFGNDPKKAFTGKNALEKNPLYADKYQTIRVPEKVQTVEFETIYTIRKPVDPALNVDKVVDVKVRAILERRLKEYGGDPKKAFVNFWENPIWLNKEKGISIKRVSIRGINNAQSIHVKKDKNGNPIWDENGKQIPVDFVNTGNNHHVAIYRKPVLDKKGQVTFDEDGNLMYELDEVVVPFFEAVTRANLGLPIIDKDYRKSEGWQFLFSMKQNEYFVFPNEKTGFNPKEVDLLNPDNYAMISPNLFRVQTMSKVMYGNNVVRDYKFRHHLETTVKDMKELKDIAYKQYKTLSFGNSVVKIRINHIGQIVSVGEY

SEQ ID NO: 302 - protein, 1055 aa, Bacteroides sp.
MRIYRKDLAQDVDVTNELLKTEEDYVALFDWLNGKKEIDQKAFLKYPLFGLKKEVENYRWNYVQDKPYPCNETRSSMLARLEKCDISIEFLTKENEEALWHILYSVEDKNEIVKALQKFADKHDLNASFVDVFQKFPPFKKEYGSYSAKAIKKLLPLMRMGKYWSENSIDKGTRERMDKIITGEYDEKIENRVREKAIHLADVSDFKGLPLWLVCYIVYGRHSEAKEITQWKSPADIDLYLRSFKQHSLRNPIVEQIIIETLRVVRDIWKQVGNIDEIHVELGREMKNPADKRKKMTQQMSENENTNLRIKYLLTEFLNPEYEVENVRPYSPSQQDILRIYEEGVLNSVSDLPEEISDILKKFTETDLKKRPSRSEVLRYKLWLEQKYRSPYTGEVIPLGKLFTPAYEIEHVIPQSCYFDDSFSNKVICEAEVNKLKSNLLGHEFIVKHHGEIVELPFGKKVRIFTVDEYEQFVKDNYSRTRSKMKKLLMDDIPEEFVARQLNDSRYISKVVKSLLSNIVREKGEEEAISKNVIPCTGGVTDRLKKDWGINEVWNKIILPRFQRLNELTGTNKFTTKNVGIQEIPTMPLELQKGFNKKRIDHRHHAMDAIIIACANRNIINYLNNESATAKAELSRYDLQKMLCDKAKTDNNGNYKWVIRKPWASFTQDTYLALENIIVSFKQNLRVINKATNHFLHYNEEGKKIFVKQGKGDNWAIRKSMHKDTVFGEVNLRRIKTVALNEAMKNPQSIVVKDFKRKLLELWNLGFDAKRIKKYFEDNRETWSDINLSKIEVYYFSKDTKDRFFATRKPLDTSFDRKKIENNITDTGIQKILLRHLELKDNNPDIAFSPDGIDEMNRNIIQLNNGKYHQPIIKVRWYEQADKFAVGQTGNKSSKFVEAAKGTNLFFAVYESNILDKKTNTIIKKRNYATIPLNVAIERQKQGLPVAPEDENGNDPIFVLSPNDLVYLPTAADLANGIIAQPLDRGRIYKMVSCTGNEGYFIPARIANPILQTIELGSNNKAQKAWTDEMIKEICMPIKVDRLGNVLESSSSYKK

SEQ ID NO: 303 - protein, 1055 aa, Bacteroides sp.
MRIYRKDLAQDVDVTNELLKTEEDYVALFDWLNGKKEIDQKAFLKYPVFGLKKEIENYRWNYVQDKPYPCNETRSLMLARLEKCDISIEFLTKENEEALWHILYSVEDKNEIVKALQKFADKHDLNASFVDVFQKFPPFKKEYGSYSAKAIKKLLPLMRMGKYWSENSIDKGTRERIDKIITGEYDEKIENRVREKAIHLADVSDFKGLPLWLVCYIVYGRHSEAKEIIQWKSPADIDSYLRSFKQHSLRNPIVEQIIIETLRVVRDIWKQVGNIDEIHVELGREMKNPADKRKKMTQQMSENENTNLRIKYLLTEFLNPEYEVENVRPYSPSQQDILRIYEEGVLNSVSDLPEEISDILKKFTETDLKKRPSRSEVLRYKLWLEQKYRSPYTGEVIPLGKLFTPAYEIEHVIPQSCYFDDSFSNKVICEAEVNKLKSNLLGHEFIVKHHGEIVELPFGKKVRIFTVDEYEQFVKDNYSRTRSKMKKLLMDDIPEEFVTRQLNDSRYISKVVKSLLSNIVREKGEEEAISKNVIPCTGGVTDRLKKDWGINEVWNKIILPRFQRLNELTGTNKFTTKNVGIQEIPTMPLELQKGFNKKRIDHRHHAMDAIIIACANRNIINYLNNESATAKAELSRYDLQKMLCDKAKTDNNGNYKWVIRKPWASFTQDTYLALENIIVSFKQNLRVINKATNRFLHYNEEGKKIFVKQGKGDNWAIRKSMHKDTVFGEVNLRRIKTVALNEAMKNPQSIVVKDFKRKLLELWNLGFDAKRIKKYFEDNRETWSDINLSKIEVYYFSKDTKDRFFATRKPLDTSFDRKKIENNITDTGIQKILLRHLELKDNNPDIAFSPDGIDEMNRNIIQLNNGKYHQPIIKIRWYEQADKFAVGQTGNKSSKFVEAAKGTNLFFAVYESNILDKKTNTIIKKRNYATIPLNVAIERQKQGLPVAPEDENGNDPIFVLSPNDLVYLPTDDELANGIIAQPLDRGRIYKMVSSSGEQCFFIKHIVANVLVDKFEFSPLNKMERALTGEMIKMICIPIKVDRLGNVLESSSSYKK

SEQ ID NO: 304 - protein, 286 aa, Bacteroides uniformis
MLSYKYDKKKIEKYFKENAFLWKELDIAKVAVYYFTENTTEPLVAVRKSLDSTFNEKKIASVTDTGIQKILLNHLKSKEGKAELAFSAEGIEEMNRNLLQLNDGKGHQPIYKVRVYEPRGNKFKVGVLGNKGAKWVEAAKGTNLFFAIYITEDGNRTYETIPLNWVIEREKQGLVPVPDRNEKGDKLLFWLSPNDLVYLPTEEERDFGRINEPIDRGRIYKMVSSSGNQCFFIPQSISNAIISTKELGSNNKAEKSWDGEMIKNICIPVKVDRLGRIIEVKYRVNE

SEQ ID NO: 305 - protein, 1508 aa, Bacteroides uniformis
MRTILGLDLGTNSIGWAVINSVIKEQTERIWIEMAGSRIIPMDAAILGDFDKGNSISQTAERTRFRGVRRLRERQLLRRERLHKVLKILGFLPEHYLKGIDFEKHTGKFLSGSEPKLPWVKDRWGKYSFLFQTAFNEMLADFAKHQPSLVFDGKKIPYDWTVYYLRKKALTEMISKEELAWILLNFNQKRGYYQLRGEEEEDNAGKSVEFYALKVLSVEATDEKKGRDIWYNVHLENGWVYRRSSNVPLDWEGRVKEFIVTTDLNPDGTPKLDKYGEVKRSFRAPKEDDWMLIKKRTEADITGTHKTIGSYIYDALLQEPQQKIIGKLVKTVERKFYKEELNFILQKQCAFHAELQDRDLYMRCIEALYPGNEVQRRNIANRDFIYLLIDDVLFYQRPLKTKKSLIANCPYEENEYVNRKTGEIKTAPLKCIAKSHPLFQEFRLWYFLSNIRVYQKEREVNGTLHLDVDVTTEFLKTEDDYVALFDWLNSRKEIDQKAFLRYPAFGLKKEINNYRWNYVEDKFYPCNETRHAILSRLEKAGIGIDFLSDEKETALWHILYSVSDKQEIEKALATFAVKNGLNESFVEVFKKFPPFKSEYGAYSAKAIKKLLPLMRCGKYWDMSLIDGTTKERIERIIAGECDESIGAKVREKAMNLSDISCFKRLPLWLACYVVYNRHSEDKEITKWETPADIDAYLAAFKQHSLRNPIVEQVITETLRVVRDIWKQVGKIDEIRIELGREMKNPADKRKRMTTQILENENANLRIKALLAEFVNPEYGVENVRPYSPSQQEILRIYEDAVLKGEEQIPEDIDVILKKFNTSKLPTKSEFLRYKLWLEQKYRSPYTGELIPLAKLFTAAYEIEHVIPQSRYFDDSFSNKVICESAVNKLKDNQLGYEFIKNHHGQKVEVGFGKTVEIFSVDSYERFVKEQYAKSGIKMKKLLMDDIPEQFIERQLNDSRYISKVVKGLLSNIVREKNDSGEYEPEAVSKNILVCTGSVTDRLKKDWGMNDVWNSIVSPRFERLNALTETQCFGHWENKDGKKVFQTAVPLEYQKGFSKKRIDHRHHAMDAIVIACATRNHVNYLNNESASRNAKISRYDLQRLLCDKSRGDGNGNYRWIIKKPWTTFTQDAREALSGIIVSLKQNLRIINKTTNIYQHFDANGTRVYEKQKIGDSWAIRKPMHKDTVFGAVNLRKVKVVRLSVALDTPSMIVNKRVKNKVLELLSYKYDKKKIEKYFKENAFLWKELDIAKVAVYYFTENTTEPLVAVRKSLDSTFNEKKIASVTDTGIQKILLNHLKSKEGKAELAFSAEGIEEMNRNLLQLNDGKGHQPIYKVRVYEPRGNKFKVGVLGNKGAKWVEAAKGTNLFFAIYITEDGNRTYETIPLNWVIEREKQGLVPVPDRNEKGDKLLFWLSPNDLVYLPTEEERDFGRINEPIDRGRIYKMVSSSGNQCFFIPQSISNAIISTKELGSNNKAEKSWDGEMIKNICIPVKVDRLGRIIEVKYRVNE

SEQ ID NO: 306 - protein, 1210 aa, Bacteroides uniformis
MRTILGLDLGTNSIGWAVINSVIKEQTERIWIEMAGSRIIPMDAAILGDFDKGNSISQTAERTRFRGVRRLRERQLLRRERLHKVLKILGFLPEHYLKGIDFEKHTGKFLSGSEPKLPWVKDRWGKYSFLFQTAFNEMLADFAKHQPSLVFDGKKIPYDWTVYYLRKKALTEMISKEELAWILLNFNQKRGYYQLRGEEEEDNAGKSVEFYALKVLSVEATDEKKGRDIWYNVHLENGWVYRRSSNVPLDWEGRVKEFIVTTDLNPDGTPKLDKYGEVKRSFRAPKEDDWMLIKKRTEADITGTHKTIGSYIYDALLQEPQQKIIGKLVKTVERKFYKEELNFILQKQCAFHAELQDRDLYMRCIEALYPGNEVQRRNIANRDFIYLLIDDVLFYQRPLKTKKSLIANCPYEENEYVNRKTGEIKTAPLKCIAKSHPLFQEFRLWYFLSNIRVYQKEREVNGTLHLDVDVTTEFLKTEDDYVALFDWLNSRKEIDQKAFLRYPAFGLKKEINNYRWNYVEDKFYPCNETRHAILSRLEKAGIGIDFLSDEKETALWHILYSVSDKQEIEKALATFAVKNGLNESFVEVFKKFPPFKSEYGAYSAKAIKKLLPLMRCGKYWDMSLIDGTTKERIERIIAGECDESIGAKVREKAMNLSDISCFKRLPLWLACYVVYNRHSEDKEITKWETPADIDAYLAAFKQHSLRNPIVEQVITETLRVVRDIWKQVGKIDEIRIELGREMKNPADKRKRMTTQILENENANLRIKALLAEFVNPEYGVENVRPYSPSQQEILRIYEDAVLKGEEQIPEDIDVILKKFNTSKLPTKSEFLRYKLWLEQKYRSPYTGELIPLAKLFTAAYEIEHVIPQSRYFDDSFSNKVICESAVNKLKDNQLGYEFIKNHHGQKVEVGFGKTVEIFSVDSYERFVKEQYAKSGIKMKKLLMDDIPEQFIERQLNDSRYISKVVKGLLSNIVREKNDSGEYEPEAVSKNILVCTGSVTDRLKKDWGMNDVWNSIVSPRFERLNALTETQCFGHWENKDGKKVFQTAVPLEYQKGFSKKRIDHRHHAMDAIVIACATRNHVNYLNNESASRNAKISRYDLQRLLCDKSRGDGNGNYRWIIKKPWTTFTQDAREALSGIIVSLKQNLRIINKTTNIYQHFDANGTRVYEKQKIGDSWAIRKPMHKDTVFGAVNLRKALIPQHYNLTLFISS

SEQ ID NO: 307 - protein, 1504 aa, Bacteroides vulgatus
MKNIVGLDLGTNSIGWAVVNGSVNDDGSEQLVKIQASGSRIIPMDAAMIGDFNKGNSISQTAERTRLRGVRRLSERYLLRRERLHRILDILGFLPFHFAQDLDRHGKIVKGKEPKLAWRKNEAGQFEFIFQDSFKEMLEDFKLNHPNLITDDKKVPYDWTIYYLRKKGLTSKISKEELAWILLNFNQKRGYYQLRGEEEEENKNKLVEFYALKVVAVEDSGEKKGKDIWYNVHLENGWVYRRTSNMPLDWVGKTKEFIVTTDLEKDGTPKKDKEGNVKRSFRAPKEDDWSLLKKKTEADIDQTHKTVGVYIYDTLLGNPSQKIRGRLVRTIERKYYKEELKQILEKQKEFHLELQDRALYAACIEELYPINEAHRNNVGNRDFTYLFLEDILFYQRPLKSKKSLIDNCPYEENQGLDKETGEIKSFPVKCIAKSHPLFQEFRLWQFIVNLRIYRKDLAQDVDVTNELLKTEEDYVALFDWLNGKKEIDQKAFLKYPVFGLKKEIENYRWNYVQDKPYPCNETRSLMLARLEKCDISIEFLTKENEEALWHILYSVEDKNEIVKALQKFADKHDLNASFVDVFQKFPPFKKEYGSYSAKAIKKLLPLMRMGKYWSENSIDKGTRERIDKIITGEYDEKIENRVREKAIHLADVSDFKGLPLWLVCYIVYGRHSEAKEITQWKSPADIDSYLRSFKQHSLRNPIVEQIIIETLRVVRDIWKQVGNIDEIHVELGREMKNPADKRKKMTQQMSENENTNLRIKYLLTEFLNPEYEVENVRPYSPSQQDILRIYEEGVLNSVSDLPEEISDILKKFTETDLKKRPSRSEILRYKLWLEQKYRSPYTGEVIPLGKLFTPAYEIEHVIPQSCYFDDSFSNKVICEAEVNKLKSNLLGHEFIVKHHGEIVELPFGKKVRIFTVDEYEQFVKDNYSRTRSKMKKLLMDDIPEEFVTRQLNDSRYISKVVKSLLSNIVREKGEEEAISKNVIPCTGGVTDRLKKDWGINEVWNKIILPRFQRLNELTGTNKFTTKNVGIQEIPTMPLELQKGFNKKRIDHRHHAMDAIIIACANRNIINYLNNESATAKAELSRYDLQKMLCDKAKTDNNGNYKWVIRKPWASFTQDTYLALENIIVSFKQNLRVINKATNRFLHYNEEGKKIFVKQGKGDNWAIRKSMHKDTVFGEVNLRRIKTVALNEAMKNPQSIVVKDFKRKLLELWNLGFDAKRIKKYFEDNRETWSDINLSKIEVYYFSKDTKDRFFATRKPLDTSFDRKKIENNITDTGIQKILLRHLELKDNNPDIAFSPDGIDEMNRNIIQLNNGKYHQPIIKIRWYEQADKFAVGQTGNKFSKFVEAAKGTNLFFAVYESNILDKKTNTIIKKRNYATIPLNVAIERQKQGLPVAPEDENGNDPIFVLSPNDLVYLPTDDELANGIIAQPLDRGRIYKMVSCTGNEGHFIPARIANPILQTIELGSNNKAQKAWTDEMIKEICMPIKVDRLGNVLESSSSYKK

SEQ ID NO: 308 - protein, 1153 aa, Barnesiella intestinihominis
MKNILGLDLGLSSIGWSVIRENSEEQELVAMGSRVVSLTAAELSSFTQGNGVSINSQRTQKRTQRKGYDRYQLRRTLLRNKLDTLGMLPDDSLSYLPKLQLWGLRAKAVTQRIELNELGRVLLHLNQKRGYKSIKSDFSGDKKITDYVKTVKTRYDELKEMRLTIGELFFRRLTENAFFRCKEQVYPRQAYVEEFDCIMNCQRKFYPDILTDETIRCIRDEIIYYQRPLKSCKYLVSRCEFEKRFYLNAAGKKTEAGPKVSPRTSPLFQVCRLWESINNIVVKDRRNEIVFISAEQRAALFDFLNTHEKLKGSDLLKLLGLSKTYGYRLGEQFKTGIQGNKTRVEIERALGNYPDKKRLLQFNLQEESSSMVNTETGEIIPMISLSFEQEPLYRLWHVLYSIDDREQLQSVLRQKFGIDDDEVLERLSAIDLVKAGFGNKSSKAIRRILPFLQLGMNYAEACEAAGYNHSNNYTKAENEARALLDRLPAIKKNELRQPVVEKILNQMVNVVNALMEKYGRFDEIRVELARELKQSKEERSNTYKSINKNQRENEQIAKRIVEYGVPTRSRIQKYKMWEESKHCCIYCGQPVDVGDFLRGFDVEVEHIIPKSLYFDDSFANKVCSCRSCNKEKNNRTAYDYMKSKGEKALSDYVERVNTMYTNNQISKTKWQNLLTPVDKISIDFIDRQLRESQYIARKAKEILTSICYNVTATSGSVTSFLRHVWGWDTVLHDLNFDRYKKVGLTEVIEVNHRGSVIRREQIKDWSKRFDHRHHAIDALTIACTKQAYIQRLNNLRAEEGPDFNKMSLERYIQSQPHFSVAQVREAVDRILVSFRAGKRAVTPGKRYIRKNRKRISVQSVLIPRGALSEESVYGVIHVWEKDEQGHVIQKQRAVMKYPITSINREMLDKEKVVDKRIHRILSGRLAQYNDNPKEAFAKPVYIDKECRIPIRTVRCFAKPAINTLVPLKKDDKGNPVAWVNPGNNHHVAIYRDEDGKYKERTVTFWEAVDRCRVGIPAIVTQPDTIWDNILQRNDISENVLESLPDVKWQFVLSLQQNEMFILGMNEEDYRYAMDQQDYALLNKYLYRVQKLSKSDYSFRYHTETSVEDKYDGKPNLKLSMQMGKLKRVSIKSLLGLNPHKVHISVLGEIKEIS

SEQ ID NO: 309 - protein, 1352 aa, Belliella baltica
MKKILGLDLGTTSIGWAFIKEPEKDVVGSEIVDMGVRIVPLSSDEENDFAKGNTISINADRTLKRGARRNLQRFKQRRNALLEIFKEKKLISTNFKYAEDGPSSTFSTLNLRAKAAKEKIELQDLVKVLLQINKKRGYKSSRKAKSEEDDGSAIDSMGIAKELYENDLTPGQWVYEALQKGRKNVPDFYRSDLQEEFKKIVNYQSEFFPDIFNASFVEDWMGKASTPTKQYFNKKGVQLAENKGKREERRLQEYKWRAEAVNFKIDLSEIALILSQINSQISNSSGYLGAISDRSKELYFKNLTVGQYLYQQIKKNPHTRLKGQVFYRQDYLDEFERIWSVQSSFYPQLNDALKREVRDITIFFQRRLKSQKHLISNCEFEDHHKVVPKSHPVFQEFRIWQNLNNLLLIKKDNLNEKFDLELESKIALANELAFKRELNVKDALKILGLKPNEWEFNFTKIEGNRTNQAFFDAFAKIIELEDGEPIDLGDLKADDILDQFSEAFLRIGIDTELLQVNSDIEGAEYEKQSYIQFWHLLYSSEDDQKLKLNLIRKFGFKPEHAKILASISLQDDHASLSSRAIKKILPHLQSGLIYDKACTYAGYNHSSSFTKDENEKRELRAELELLKKNSLRNPVVEKILNQMINVVNAILKDPELGRPDEIRVEMARELKANAEQRKNMTSNIASATRDHDKYREILKSEFGLKRVTKNDLLRYKLWLETDGISLYTGKPIEASKLFSKEYDIEHIIPKARLFDDSFSNKTICERQLNIDKANVTAFSFLQNKLSADEFEQYQSRVKSLYGKLSKAKIQKLLMANDKIPEDFIARQLQETRYISKKAKEILFEISRRVSVTTGTITDKLREDWGLVEIMKELNWEKYDKLGLTYTIEGKHGERLNKIKDWSKRNDHRHHAMDALTVALTKPAYIQYLNNLNAKGLNNKKGTEVFAIEQKYLKRENGKLCFIPPIENIRSEAKKHLSRILVSYKAKNKVVTINKNKTKSKAGLNEQIALTPRGQLHKETVYGKSFHYSTKFEKIGASFNVQKINTVAKKEEREALLKRLAENGNDPKKAFTGKNTLNKMPIYLDLGKNIKLSEKVKTVVLEQNYTIRKNIDPDLKVDKVIDVGIKRILESRLEEFGGNAKLAFSNLEENPIWLNKEKGISIKRVKISGVSNVESLHVKKDHFGEPILDQEGNEIPVDFVSTGNNHHVAIYEDENGNLQEEVVSFFEAVVRQNQGLPIIKKNHTLGWKFLFTLKQNEYFVFPSDDFVPADVDLMDEQNYHLISPNLFRVQKIARKNYVFNNHLETKAVDNDLLKSKKELSKITYHFYQTPEHLRGIIKIRINHLGKIIQIGEY

SEQ ID NO: 310 - protein, 1415 aa, Bergeyella zoohelcum
MKHILGLDLGTNSIGWALIERNIEEKYGKIIGMGSRIVPMGAELSKFEQGQAQTKNADRRTNRGARRLNKRYKQRRNKLIYILQKLDMLPSQIKLKEDFSDPNKIDKITILPISKKQEQLTAFDLVSLRVKALTEKVGLEDLGKIIYKYNQLRGYAGGSLEPEKEDIFDEEQSKDKKNKSFIAFSKIVFLGEPQEEIFKNKKLNRRAIIVETEEGNFEGSTFLENIKVGDSLELLINISASKSGDTITIKLPNKTNWRKKMENIENQLKEKSKEMGREFYISEFLLELLKENRWAKIRNNTILRARYESEFEAIWNEQVKHYPFLENLDKKTLIEIVSFIFPGEKESQKKYRELGLEKGLKYIIKNQVVFYQRELKDQSHLISDCRYEPNEKAIAKSHPVFQEYKVWEQINKLIVNTKIEAGTNRKGEKKYKYIDRPIPTALKEWIFEELQNKKEITFSAIFKKLKAEFDLREGIDFLNGMSPKDKLKGNETKLQLQKSLGELWDVLGLDSINRQIELWNILYNEKGNEYDLTSDRTSKVLEFINKYGNNIVDDNAEETAIRISKIKFARAYSSLSLKAVERILPLVRAGKYFNNDFSQQLQSKILKLLNENVEDPFAKAAQTYLDNNQSVLSEGGVGNSIATILVYDKHTAKEYSHDELYKSYKEINLLKQGDLRNPLVEQIINEALVLIRDIWKNYGIKPNEIRVELARDLKNSAKERATIHKRNKDNQTINNKIKETLVKNKKELSLANIEKVKLWEAQRHLSPYTGQPIPLSDLFDKEKYDVDHIIPISRYFDDSFTNKVISEKSVNQEKANRTAMEYFEVGSLKYSIFTKEQFIAHVNEYFSGVKRKNLLATSIPEDPVQRQIKDTQYIAIRVKEELNKIVGNENVKTTTGSITDYLRNHWGLTDKFKLLLKERYEALLESEKFLEAEYDNYKKDFDSRKKEYEEKEVLFEEQELTREEFIKEYKENYIRYKKNKLIIKGWSKRIDHRHHAIDALIVACTEPAHIKRLNDLNKVLQDWLVEHKSEFMPNFEGSNSELLEEILSLPENERTEIFTQIEKFRAIEMPWKGFPEQVEQKLKEIIISHKPKDKLLLQYNKAGDRQIKLRGQLHEGTLYGISQGKEAYRIPLTKFGGSKFATEKNIQKIVSPFLSGFIANHLKEYNNKKEEAFSAEGIMDLNNKLAQYRNEKGELKPHTPISTVKIYYKDPSKNKKKKDEEDLSLQKLDREKAFNEKLYVKTGDNYLFAVLEGEIKTKKTSQIKRLYDIISFFDATNFLKEEFRNAPDKKTFDKDLLFRQYFEERNKAKLLFTLKQGDFVYLPNENEEVILDKESPLYNQYWGDLKERGKNIYVVQKFSKKQIYFIKHTIADIIKKDVEFGSQNCYETVEGRSIKENCFKLEIDRLGNIVKVIKR

SEQ ID NO: 311 - protein, 1430 aa, Bergeyella zoohelcum
MKHILGLDLGTNSIGWAVVKEAQNDNEQSEIVDVGVRVNPLTTDEKTNFEKGKPISTNADRTLKRSARRNLQRYKLRRKELIELLKEHQLISTDTILTENGKGTTFQTLELRAKSAKEKISLEELARVFLTINKKRGYKSSRKAKNEDEGQLIDGMEIAKRLYEENLTTGQLSLQLLKEGKKSLPDYYRSDLQFELDKVWNFQKQFHSDILTDEFYAQLKGKGQRATSALFLAKYQIYTAENKGSREDKKLQAYQWRVDALSKELTREQLAFVITEINNNLNNSSGYLGAISDRSKELYFNNETVGEYLWKQIAANPHTSLKNQVFYRQDYLDEFEQIWKTQSAFYPEILTDELKKELRDVVIFYQRKLKSQKSLVSFCEFENKEIEIKKEDGTSTKKVIGLKVAPKSSPLFQEFKIWQNLNNVLIRKKGSKTKKVAKNQQAVLFEEEKTISELDLEAKQALFNELNLKGNLKADYCLEILGYSPKEWEMNYSVLEGNRTNKALYEAYLKITDLEGYDAKNHLKVKLNKDEVELDDLKVPASEIKDMVQAIFKEAGINTDILHFNAELDGKDFENQASYQLWHLLYSYEGDDSKSGNELLYKLLETKFGFKKEYAQILANVSLSDDYGSLSTKAMRKIHPYIKENKFSTACELAGYRHSKHSLTKEENDNRVLKDSLEVLKKNSLRQPVVEKILNQMINLVNALLKKYRTENPNFKFDEIRIELARELKKNAEERANMTANINKAKTEHEKIIKILKNEFGLPNPTRNDIIRYRLYEELKANGYKDLYTNIKIPQEKLFTKEIDIEHIIPKSRVFDDSFSNKTLSFRKTNLDKGERTAFDYMESKFGADKLEEYVARVEDLYKNNIISKAKYQKLLKKESEIGDGFVERDLRETQYIAKKAKEILLQITPNVLSTSGGITDRLREDWDLINVMKELNLPKYRALGLTQMEDRKYGQQVEVITDWTKRNDHRHHAMDALTVAFTKHNHIQYLNYLNARKNEKHKEHSNIMGIQQLETIKVTDKNGNEKRVFKAPMPNFRQVTKAFLENILISHKAKNKVVTKNKNKVAGSNKVQEVLTPRGQLHKETVYGKYQYYVQKEEKIGAKFDLETIKKVANPLYQSLLKKRLEENGGDPKKAFTGKNSLAKNPIYLDDTQTEQLPEKVKLVWLENSFSIRKDITPENFKDEKLIDKILDEGVKRILKERLQSFGNDAKKAFSDLDKNPIWLNKEKGITIKRVTISGVANAEPLHTKKDHLGKEILDKEGKPIPVDFISTGSNHHVAVYRDEKGNLQEKVVSVFEAVVRANQGLPIIDKTYNQHLGWEFLFTMKQNEMFVFPNESTGFNPNDIDLLDPKNKRIISPNLFRVQKFSKLQYGNSFVREFVFRHHLETTVEDRKELQGITYKQMKNSTFFNDIIKVRINHLGDIVSIGEY

SEQ ID NO: 312 - protein, 1281 aa, Bifidobacterium bifidum
MEDDSQHDIREIYLAIHHMVKYRGNFLVEGTLESSNAFKEDELLKLLGRITRYEMSEGEQNSDIEQDDENKLVAPANGQLADALCATRGSRSMRVDNALEALSAVNDLSREQRAIVKAIFAGLEGNKLDLAKIFVSKEFSSENKKILGIYFNKSDYEEKCVQIVDSGLLDDEEREFLDRMQGQYNAIALKQLLGRSTSVSDSKCASYDAHRANWNLIKLQLRTKENEKDINENYGILVGWKIDSGQRKSVRGESAYENMRKKANVFFKKMIETSDLSETDKNRLIHDIEEDKLFPIQRDSDNGVIPHQLHQNELKQIIKKQGKYYPFLLDAFEKDGKQINKIEGLLAFRVPYFVGPLVVPEDLQKSDNSENHWMVRKKKGEITPWNFDEMVDKDASGRKFIERLVGTDSYLLGEPTLPKNSLLYQEYEVLNELNNVRLSVRTGNHWNDKRRMRLGREEKTLLCQRLFMKGQTVTKRTAENLLRKEYGRTYELSGLSDESKFTSSLSTYGKMCRIFGEKYVNEHRDLMEKIVELQTVFEDKETLLHQLRQLEGISEADCALLVNTHYTGWGRLSRKLLTTKAGECKISDDFAPRKHSIIEIMRAEDRNLMEIITDKQLGFSDWIEQENLGAENGSSLMEVVDDLRVSPKVKRGIIQSIRLIDDISKAVGKRPSRIFLELADDIQPSGRTISRKSRLQDLYRNANLGKEFKGIADELNACSDKDLQDDRLFLYYTQLGKDMYTGEELDLDRLSSAYDIDHIIPQAVTQNDSIDNRVLVARAENARKTDSFTYMPQIADRMRNFWQILLDNGLISRVKFERLTRQNEFSEREKERFVQRSLVETRQIMKNVATLMRQRYGNSAAVIGLNAELTKEMHRYLGFSHKNRDINDYHHAQDALCVGIAGQFAANRGFFADGEVSDGAQNSYNQYLRDYLRGYREKLSAEDRKQGRAFGFIVGSMRSQDEQKRVNPRTGEVVWSEEDKDYLRKVMNYRKMLVTQKVGDDFGALYDETRYAATDPKGIKGIPFDGAKQDTSLYGGFSSAKPAYAVLIESKGKTRLVNVTMQEYSLLGDRPSDDELRKVLAKKKSEYAKANILLRHVPKMQLIRYGGGLMVIKSAGELNNAQQLWLPYEEYCYFDDLSQGKGSLEKDDLKKLLDSILGSVQCLYPWHRFTEEELADLHVAFDKLPEDEKKNVITGIVSALHADAKTANLSIVGMTGSWRRMNNKSGYTFSDEDEFIFQSPSGLFEKRVTVGELKRKAKKEVNSKYRTNEKRLPTLSGASQP

SEQ ID NO: 313 - protein, 1121 aa, Bifidobacterium dentium
MSVGLAAIEVDETGFPIRILNIQSVIHDGGIDPQLGKKKSISRKAISGVARRTRRMRRRKVVRLRQLDATLESLGFPIVEPDSLDTWEIWLTRAKLASSYIQDDETRKEDVSIALRHIARHRGWRNPYSNVESLFVDVAPSEQYEELRRKAEEKLGTSLSGNPTSAEIVECILKRQVGEVQLRTRSRKGVNGNAVEKEGLLPTKLMQSDNAAEIRRIFKVQRIDDETGRKLLRAVFKACSPKGSVERRVGRDALAPGLPRALKASLAFQEYRIANVLTNLVISEDGTKRKLTIAEKQRVFGFLSSNETDDITWIDVAEKLGLERRQIQGVGCLTADGEERISSTPPRNITALHIHSAKPVIREKLVAWWKAASPTVRETMVELLSNTVDIDRVREDMDYSSAVAFIDSLGDEELTALDSVDLLSGRAAYSRQTLKQLTERMLNTDDDLHEARKAVFGVDDNWKPPVDAISTSVGNPAVDRVLKIVNRYLLACQKRWRNPQSVQIEHVRESFSSVAKAKETERVQGERARYRNDLRRELCEQEGLNKIRESDIRRWESVQRQNGTCLYCGSPITFRTCEMDHIVPRKGVGSTNTRVNLAAACAACNKLKSNTAFSVWARTEGAANRKVSQRDAIERVKTFIFNKSVPPREQRAFKQAVISRLRQAESDPAIDNRSIESVAWMADELHRRIEAYFNQDADVSGNTPATQVWVFQGRVTALARKASGIEGRIHFAGEWKKTRLDRRHHAVDAAVIAMMNHSAAQTLVERDSLRLSQWITRKPETWKNYPFSEGQKKTRFKEWLDCMNALLDLLNDALDSDRVPVTRCQRMSLGNSQAHAATIRKMKRVELFSPMDADLIRRASTPALYCALTRLPEYSPEKGLPENRGREIVLNGRHIRSTETVDFFASGAAQLMVRNGSAEIGDSIHHMRIYRYRKTGAKSQEYVYGMIRVFQIDLLHASSENLFAVQLPSQSVSVRYGDKNVVQAIQEGRAEYLGHIVPNDEILISYEGVRMKDSEKIGAYANDFSGTASELAQRRHWVVVGSDVSKLALRPSYLSEEGLENSGSESERLSKQTRKVIEGKGWVVAVNILAKYHPVVIRRNALGEPRFRTNSGMPVSWRWDR

SEQ ID NO: 314 - protein, 354 aa, Bifidobacterium longum
AKQYVNSASIDDAEAETMKTTVSVFQGRVTASARRAAGIEGKIHFIGQQSKTRLDRRHHAVDASVIAMMNTAAAQTLMERESLRESQRLIGLMPGERSWKEYPYEGTSRYESFHLWLDNMDVLLELLNDALDNDRIAVMQSQRYVLGNSIAHDATIHPLEKVPLGSAMSADLIRRASTPALWCALTRLPDYDEKEGLPEDSHREIRVHDTRYSADDEMGFFASQAAQIAVQEGSADIGSAIHHARVYRCWKTNAKGVRKYFYGMIRVFQTDLLRACHDDLFTVPLPPQSISMRYGEPRVVQALQSGNAQYLGSLVVGDEIEMDFSSLDVDGQIGEYLQFFSQFSGGNLAWKHWV

SEQ ID NO: 315 - protein, 1124 aa, Bifidobacterium longum
LTGHSGHTFWPTSSSPPIQLEQEKRPLPQRNTSQNGHTFWPITRERCFMRGKRYRIGIDVGLNSVGLAAVEVSDENSPVRLLNAQSVIHDGGVDPQKNKEAITRKNMSGVARRTRRMRRRKRERLHKLDMLLGKFGYPVIEPESLDKPFEEWHVRAELATRYIEDDELRRESISIALRHMARHRGWRNPYRQVDSLISDNPYSKQYGELKEKAKAYNDDATAAEEESTPAQLVVAMLDAGYAEAPRLRWRTGSKKPDAEGYLPVRLMQEDNANELKQIFRVQRVPADEWKPLFRSVFYAVSPKGSAEQRVGQDPLAPEQARALKASLAFQEYRIANVITNLRIKDASAELRKLTVDEKQSIYDQLVSPSSEDITWSDLCDFLGFKRSQLKGVGSLTEDGEERISSRPPRLTSVQRIYESDNKIRKPLVAWWKSASDNEHEAMIRLLSNTVDIDKVREDVAYASAIEFIDGLDDDALTKLDSVDLPSGRAAYSVETLQKLTRQMLTTDDDLHEARKTLFNVTDSWRPPADPIGEPLGNPSVDRVLKNVNRYLMNCQQRWGNPVSVNIEHVRSSFSSVAFARKDKREYEKNNEKRSIFRSSLSEQLRADEQMEKVRESDLRRLEAIQRQNGQCLYCGRTITFRTCEMDHIVPRKGVGSTNTRTNFAAVCAECNRMKSNTPFAIWARSEDAQTRGVSLAEAKKRVTMFTFNPKSYAPREVKAFKQAVIARLQQTEDDAAIDNRSIESVAWMADELHRRIDWYFNAKQYVNSASIDDAEAETMKTTVSVFQGRVTASARRAAGIEGKIHFIGQQSKTRLDRRHHAVDASVIAMMNTAAAQTLMERESLRESQRLIGLMPGERSWKEYPYEGTSRYESFHLWLDNMDVLLELLNDALDNDRIAVMQSQRYVLGNSIAHDATIHPLEKVPLGSAMSADLIRRASTPALWCALTRLPDYDEKEGLPEDSHREIRVHDTRYSADDEMGFFASQAAQIAVQEGSADIGSAIHHARVYRCWKTNAKGVRKYFYGMIRVFQTDLLRACHDDLFTVPLPPQSISMRYGEPRVVQALQSGNAQYLGSLVVGDEIEMDFPVSMLMVRLASIYNSSRSLVEGTLHGNIGLLMDSLTRRS

SEQ ID NO: 316 - protein, 166 aa, Bifidobacterium longum
MGLAAVEVSDENSPVRLLNAQSVIHDGGVDPQKNKEAITRKNMSGVARRTRRMRRRKRERLHKLDMLLGKFGYPVIEPESLDKPFEEWHVRAELATRYIEDDELRRESISIALRHMARHRGWRNPYRQVDSLISDNPYSKQYGELKEKAKAYNDDATAAEEESTPA

SEQ ID NO: 317 - protein, 1138 aa, Bifidobacterium longum
MNSVGLAAVEVSDENSPVRLLNAQSVIHDGGVDPQKNKEAITRKNMSGVARRTRRMRRRKRERLHKLDMLLGKFGYPVIEPESLDKPFEEWHVRAELATRYIEDDELRRESISIALRHMARHRGWRNPYRQVDSLISDNPYSKQYGELKEKAKAYNDDATAAEEESTPAQLVVAMLDAGYAEAPRLRWRTGSKKPDAEGYLPVRLMQEDNANELKQIFRVQRVPADEWKPLFRSVFYAVSPKGSAEQRVGQDPLAPEQARALKASLAFQEYRIANVITNLRIKDASAELRKLTVDEKQSIYDQLVSPSSEDITWSDLCDFLGFKRSQLKGVGSLTEDGEERISSRPPRLTSVQRIYESDNKIRKPLVAWWKSASDNEHEAMIRLLSNTVDIDKVREDVAYASAIEFIDGLDDDALTKLDSVDLPSGRAAYSVETLQKLTRQMLTTDDDLHEARKTLFNVTDSWRPPADPIGEPLGNPSVDRVLKNVNRYLMNCQQRWGNPVSVNIEHVRSSFSSVAFARKDKREYEKNNEKRSIFRSSLSEQLRADEQMEKVRESDLRRLEAIQRQNGQCLYCGRTITFRTCEMDHIVPRKGVGSTNTRTNFAAVCAECNRMKSNTPFAIWARSEDAQTRGVSLAEAKKRVTMFTFNPKSYAPREVKAFKQAVIARLQQTEDDAAIDNRSIESVAWMADELHRRIDWYFNAKQYVNSASIDDAEAETMKTTVSVFQGRVTASARRAAGIEGKIHFIGQQSKTRLDRRHHAVDASVIAMMNTAAAQTLMERESLRESQRLIGLMPGERSWKEYPYEGTSRYESFHLWLDNMDVLLELLNDALDNDRIAVMQSQRYVLGNSIAHDATIHPLEKVPLGSAMSADLIRRASTPALWCALTRLPDYDEKEGLPEDSHREIRVHDTRYSADDEMGFFASQAAQIAVQEGSADIGSAIHHARVYRCWKTNAKGVRKYFYGMIRVFQTDLLRACHDDLFTVPLPPQSISMRYGEPRVVQALQSGNAQYLGSLVVGDEIEMDFSSLDVDGQIGEYLQFFSQFSGGNLAWKHWVVDGFFNQTQLRIRPRYLAAEGLAKAFSDDVVPDGVQKIVTKQGWLPPVNTASKTAVRIVRRNAFGEPRLSSAHHMPCSWQWRHE

SEQ ID NO: 318 - protein, 182 aa, Bifidobacterium longum
MRGKRYRIGIDVGLNSVGLAAVEVSDENSPVRLLNAQSVIHDGGVDPQKNKEAITRKNMSGVARRTRRMRRRKRERLHKLDMLLGKFGYPVIEPESLDKPFEEWHVRAELATRYIEDDELRRESISIALRHMARHRGWRNPYRQVDSLISDNPYSKQYGELKEKAKAYNDDATAAEEESTPA

SEQ ID NO: 319 - protein, 441 aa, Bifidobacterium longum
MVAMLDAGYAEAPRLRWRTGSKKPDAEGYLPVRLMQEDNANELKQIFRVQRVPADEWKPLFRSVFYAVSPKGSAEQRVGQDPLAPEQARALKASLAFQEYRIANVITNLRIKDASAELRKLTVDEKQSIYDQLVSPSSEDITWSDLCDFLGFKRSQLKGVGSLTEDGEERISSRPPRLTSVQRIYESDNKIRKPLVAWWKSASDNEHEAMIRLLSNTVDIDKVREDVAYASAIEFIDGLDDDALTKLDSVDLPSGRAAYSVETLQKLTRQMLTTDDDLHEARKTLFNVTDSWRPPADPIGEPLGNPSVDRVLKNVNRYLMNCQQRWGNPVSVNIEHVRSSFSSVAFARKDKREYEKNNEKRSIFRSSLSEQLRADEQMEKVRESDLRRLEAIQRQNGQCLYCGRTITFRTCEMDHIVPRKGVGSTNTRTNFAAVCAECNRM

SEQ ID NO: 320 - protein, 967 aa, Bifidobacterium longum
MVAMLDAGYAEAPRLRWRTGSKKPDAEGYLPVRLMQEDNANELKQIFRVQRVPADEWKPLFRSVFYAVSPKGSAEQRVGQDPLAPEQARALKASLAFQEYRIANVITNLRIKDASAELRKLTVDEKQSIYDQLVSPSSEDITWSDLCDFLGFKRSQLKGVGSLTEDGEERISSRPPRLTSVQRIYESDNKIRKPLVAWWKSASDNEHEAMIRLLSNTVDIDKVREDVAYASAIEFIDGLDDDALTKLDSVDLPSGRAAYSVETLQKLTRQMLTTDDDLHEARKTLFNVTDSWRPPADPIGEPLGNPSVDRVLKNVNRYLMNCQQRWGNPVSVNIEHVRSSFSSVAFARKDKREYEKNNEKRSIFRSSLSEQLRADEQMEKVRESDLRRLEAIQRQNGQCLYCGRTITFRTCEMDHIVPRKGVGSTNTRTNFAAVCAECNRMKSNTPFAIWARSEDAQTRGVSLAEAKKRVTMFTFNPKSYAPREVKAFKQAVIARLQQTEDDAAIDNRSIESVAWMADELHRRIDWYFNAKQYVNSASIDDAEAETMKTTVSVFQGRVTASARRAAGIEGKIHFIGQQSKTRLDRRHHAVDASVIAMMNTAAAQTLMERESLRESQRLIGLMPGERSWKEYPYEGTSRYESFHLWLDNMDVLLELLNDALDNDRIAVMQSQRYVLGNSIAHDATIHPLEKVPLGSAMSADLIRRASTPALWCALTRLPDYDEKEGLPEDSHREIRVHDTRYSADDEMGFFASQAAQIAVQEGSADIGSAIHHARVYRCWKTNAKGVRKYFYGMIRVFQTDLLRACHDDLFTVPLPPQSISMRYGEPRVVQALQSGNAQYLGSLVVGDEIEMDFSSLDVDGQIGEYLQFFSQFSGGNLAWKHWVVDGFFNQTQLRIRPRYLAAEGLAKAFSDDVVPDGVQKIVTKQGWLPPVNTASKTAVRIVRRNAFGEPRLSSAHHMPCSWQWRHE

SEQ ID NO: 321 - protein, 1151 aa, Bifidobacterium sp.
MRGKRYRIGIDVGLNSVGLAAVEVSDENSPVRLLNAQSVIHDGGVDPQKNKEAITRKNMSGVARRTRRMRRRKRERLHKLDMLLGKFGYPVIEPESLDKPFEEWHVRAELATRYIEDDELRRESISIALRHMARHRGWRNPYRQVDSLISDNPYSKQYGELKEKAKAYNDDATAAEEESTPAQLVVAMLDAGYAEAPRLRWRTGSKKPDAEGYLPVRLMQEDNANELKQIFRVQRVPADEWKPLFRSVFYAVSPKGSAEQRVGQDPLAPEQARALKASLAFQEYRIANVITNLRIKDASAELRKLTVDEKQSIYDQLVSPSSEDITWSDLCDFLGFKRSQLKGVGSLTEDGEERISSRPPRLTSVQRIYESDNKIRKPLVAWWKSASDNEHEAMIRLLSNTVDIDKVREDVAYASAIEFIDGLDDDALTKLDSVDLPSGRAAYSVETLQKLTRQMLTTDDDLHEARKTLFNVTDSWRPPADPIGEPLGNPSVDRVLKNVNRYLMNCQQRWGNPVSVNIEHVRSSFSSVAFARKDKREYEKNNEKRSIFRSSLSEQLRADEQMEKVRESDLRRLEAIQRQNGQCLYCGRTITFRTCEMDHIVPRKGVGSTNTRTNFAAVCAECNRMKSNTPFAIWARSEDAQTRGVSLAEAKKRVTMFTFNPKSYAPREVKAFKQAVIARLQQTEDDAAIDNRSIESVAWMADELHRRIDWYFNAKQYVNSASIDDAEAETMKTTVSVFQGRVTASARRAAGIEGKIHFIGQQSKTRLDRRHHAVDASVIAMMNTAAAQTLMERESLRESQRLIGLMPGERSWKEYPYEGTSRYESFHLWLDNMDVLLELLNDALDNDRIAVMQSQRYVLGNSIAHDATIHPLEKVPLGSAMSADLIRRASTPALWCALTRLPDYDEKEGLPEDSHREIRVHDTRYSADDEMGFFASQAAQIAVQEGSADIGSAIHHARVYRCWKTNAKGVRKYFYGMIRVFQTDLLRACHDDLFTVPLPPQSISMRYGEPRVVQALQSGNAQYLGSLVVGDEIEMDFSSLDVDGQIGEYLQFFSQFSGGNLAWKHWVVDGFFNQTQLRIRPRYLAAEGLAKAFSDDVVPDGVQKIVTKQGWLPPVNTASKTAVRIVRRNAFGEPRLSSAHHMPCSWQWRHE

SEQ ID NO: 322 - protein, 1092 aa, Brevibacillus laterosporus
MAYTMGIDVGIASCGWAIVDLERQRIIDIGVRTFEKAENPKNGEALAVPRREARSSRRRLRRKKHRIERLKYMFVRNGLAVDIQHLEQTLRSQNEIDVWQLRVDGLDRMLTQKEWLRVLIHLAQRRGFQSNRKTDGSSEDGQVLVNVTENDRLMEEKDYRTVAEMMVKDEKFSDHKRNKNGNYHGVVSRASLLVEIHTLFESQRQHHNFLASKDFELEYINIWSSQRPVATKDQIEKMIGTCTFLPKEKRAPKASWHFQYFMLLQTINHIRITNAQGTRPLNKEEIEQVVNMALTKSKVSYHDIRKVLDLSEEYQFVGLDYGKEDEKKKVESKETIIKLDDYHKLNKIFNEVELAKGETWEAVDYDTVAYALTFFKDDEDIRDYLQNKYKDSKNRLVKNVANKEYTNELIEKVSTLSFRKVGHLSLKALRKIIPFLEQGMTYDKACQAAGFNFQGISKKKRSVVLPVIDQISNPVVNRALTQTRKVINALIKKYGSPETIHIETARELSKRFDERKNITKDYKENRDKNERAKKHLSELGIINPTGLDIVKYKLWCEQQGRCMYSNQPISFERLRESGYTEVDHIIPYSRSMNDSYNNRVLVMTRENREKSNQTPYEYMGNDTQRWDEFEQRVTTNPQIKKEKRQNLLLKGFTNRRELEMLERNLNDTRHITKYLSHFISTNLEFSPSDKKKKVVNTSGRITSHLRSRWGLEKNREQNDLHHAMDAVVIAVTSDSFIQQVTNYYKRKERRELNGDDKFPLPWKFFREEVIARLSPNPKEQIEALPNHFYSEDELADLQPIFVSRMPKRSITGEAHQAQFRRVVGKTKEGKNITAKKTALVDISYDKNGDFNMYGRETDPATYEAIKERYLEFGGNAKKAFSTDLHKPKKDGTKGPLIKSVRIMENKTLVHPVNKGKGVVYNSSIVRTDVFQRKEKYYLLPVYVTDVTKGKLPNKVIAAKKGYDDWIEVDDSFTFLYSLYPNDLIFIRQNPKKKISLKKRIESHSISDSKEVQEILTYYKGVDSSTAAIEFITHDGSYYAKGVGVQNLDCFEKYQVDILGNYSKVKGEKRLELETSDNNHKGKDVNSIKSTSR

SEQ ID NO: 323 - protein, 103 aa, Butyrivibrio fibrisolvens
MISVGQSRKDLEDLGYEFKLSFYKEDIIEYEKNGDILVERFLSRTMPQVRNYIETKPIDRPKYDKRNPVGLSKTSSIRKITMDILGNRFYVDKMSFNNVVGTQ

SEQ ID NO: 324 - protein, 177 aa, Butyrivibrio fibrisolvens
MLIAFSQMGYDAYHELTNKYIDFETGEIIDKEGFNELLNNDLVYKNTMYESKWLKIKGNIEKAAEKNKYWYQVNKKCNRGLCNQTVYGTRESDGDVYKISKIDIRTDDGFKKFKNIVDKGNESVFLMYENDPKTFELIMDIYKNYSDSKNPFVQYEKETGDIIRKYSKKITGQRFLN

SEQ ID NO: 325 - protein, 1442 aa, Caenispirillum salinarum
MPVLSPLSPNAAQGRRRWSLALDIGEGSIGWAVAEVDAEGRVLQLTGTGVTLFPSAWSNENGTYVAHGAADRAVRGQQQRHDSRRRRLAGLARLCAPVLERSPEDLKDLTRTPPKADPRAIFFLRADAARRPLDGPELFRVLHHMAAHRGIRLAELQEVDPPPESDADDAAPAATEDEDGTRRAAADERAFRRLMAEHMHRHGTQPTCGEIMAGRLRETPAGAQPVTRARDGLRVGGGVAVPTRALIEQEFDAIRAIQAPRHPDLPWDSLRRLVLDQAPIAVPPATPCLFLEELRRRGETFQGRTITREAIDRGLTVDPLIQALRIRETVGNLRLHERITEPDGRQRYVPRAMPELGLSHGELTAPERDTLVRALMHDPDGLAAKDGRIPYTRLRKLIGYDNSPVCFAQERDTSGGGITVNPTDPLMARWIDGWVDLPLKARSLYVRDVVARGADSAALARLLAEGAHGVPPVAAAAVPAATAAILESDIMQPGRYSVCPWAAEAILDAWANAPTEGFYDVTRGLFGFAPGEIVLEDLRRARGALLAHLPRTMAAARTPNRAAQQRGPLPAYESVIPSQLITSLRRAHKGRAADWSAADPEERNPFLRTWTGNAATDHILNQVRKTANEVITKYGNRRGWDPLPSRITVELAREAKHGVIRRNEIAKENRENEGRRKKESAALDTFCQDNTVSWQAGGLPKERAALRLRLAQRQEFFCPYCAERPKLRATDLFSPAETEIDHVIERRMGGDGPDNLVLAHKDCNNAKGKKTPHEHAGDLLDSPALAALWQGWRKENADRLKGKGHKARTPREDKDFMDRVGWRFEEDARAKAEENQERRGRRMLHDTARATRLARLYLAAAVMPEDPAEIGAPPVETPPSPEDPTGYTAIYRTISRVQPVNGSVTHMLRQRLLQRDKNRDYQTHHAEDACLLLLAGPAVVQAFNTEAAQHGADAPDDRPVDLMPTSDAYHQQRRARALGRVPLATVDAALADIVMPESDRQDPETGRVHWRLTRAGRGLKRRIDDLTRNCVILSRPRRPSETGTPGALHNATHYGRREITVDGRTDTVVTQRMNARDLVALLDNAKIVPAARLDAAAPGDTILKEICTEIADRHDRVVDPEGTHARRWISARLAALVPAHAEAVARDIAELADLDALADADRTPEQEARRSALRQSPYLGRAISAKKADGRARAREQEILTRALLDPHWGPRGLRHLIMREARAPSLVRIRANKTDAFGRPVPDAAVWVKTDGNAVSQLWRLTSVVTDDGRRIPLPKPIEKRIEISNLEYARLNGLDEGAGVTGNNAPPRPLRQDIDRLTPLWRDHGTAPGGYLGTAVGELEDKARSALRGKAMRQTLTDAGITAEAGWRLDSEGAVCDLEVAKGDTVKKDGKTYKVGVITQGIFGMPVDAAGSAPRTPEDCEKFEEQYGIKPWKAKGIPLA

SEQ ID NO: 326 - protein, 984 aa, Campylobacter coli
MARILAFDIGISSIGWAFSENDELKDCGVRIFTKAENPKTGESLALPRRLARSARKCLARRKARLNHLKHLIANEFKLNYEDYQSFDESLAKAYKGSLISPYELRFRALNELLSKQDFARVILHIAKRRGYDDIKNNGDEEKSEILKAIKQNEEKLVNYQSVGEYLYKEYFQKFKENSKEFINVRNKKESYERCIAQSFLKDELKLIFQKQREFGFSFSKKFEEEVLSVAFYKRALKDFSHLVGNCSFFTDEKRAPKNSPLAFMFVALTRIINLLNNLKNTEGILYTKDDLNALLNEVLKNGTLTYKQTKKLLGLSDDYEFKGEKGTYFIEFKKYKEFIKALGEHNLSQDDLNEIAKDITLIKDEIKLKKALAKYDLNQNQIDSLSKLEFKDHLNISFKALKLITPLMLEGKKYDEACNELNLKVAINEDKKDFLPAFNETYYKDEVTNPVVLRAIKEYRKVLNALLKKYGKVHKINIELAREVGKNHSQRAKIEKEQNENYKAKKDAELECEKLGLKINSKNILKLRLFKEQKEFCAYSGEKIKISDLQDEKMLEIDHIYPYSRSFDDSYMNKVLVFTKQNQEKLNQTPFEAFGNDSAKWQKIEVLAKNLPTKKQKRILDKNYKDKEQKNFKDRNLNDTRYIARLVLNYTKDYLDFLPLSDDENTKLNDTQKGSKVHVEAKSGMLTSALRHTWGFSAKDRNNHLHHAIDAVIIAYANNSIVKAFSDFKKEQESNSAELYAKKISELDYKNKRKFFEPFSGFRQKVLDKIDEIFVSKPERKKPSGALHEETFRKEEEFYQSYGGKEGVLKALELGKIRKVNGKIVKNGDMFRVDIFKHKKTNKFYAVPIYTMDFALKVLPNKAVARSKKGEIKDWILMDENYEFCFSLYKDSLILIQTKDMQEPEFVYYNAFTSSTVSLIVSKHDNKFETLSKNQKILFKNANEKEVIAKSIGIQNLKVFEKYIVSALGEVTKAEFRQREDFKK

SEQ ID NO: 327 - protein, 984 aa, Campylobacter coli
MARILAFDIGISSIGWAFSENDELKDCGVRIFTKAENPKTGESLALPRRLARSARKRLARRKARLNHLKHLIANEFKLNYEDYQSFDESLAKAYKGSLISPYELRFRALNELLSKQDFARVILHIAKRRGYDDIKNNGDEEKGKILKAIKQNEEKLVNYQSVGEYLYKEYFQKFKENSKEFINVRNKKESYERCITQSFLKYELKLIFQKQREFGFSFSKKFEEEVLSVAFYKRALKDFSHLVGNCSFFSDEKRAPKNSPLAFMFVALTRIINLLNNLKNTEGILYTKDDLNALLNEVLKNGTLTYKQTKKLLGLSDDYEFKGEKGTYFIEFKKYKEFIKALGEHNLSQDDLNEIAKDITLIKDEIKLKKALAKYDLNQNQIDSLSKLEFKDHLNISFKALKLITPLMLEGKKYDEACNELNLKVAINEDKKDFLPAFNETYYKDEVTNPVVLRAIKEYRKVLNALLKKYGKVHKINIELAREVGKNYSQRAKIEKEQNENYKAKKDAELECEKLGLKINSKNILKLRLFKEQKEFCAYSGEKIKISDLQDEKMLEIDHIYPYSRSFDDSYMNKVLVFTKQNQEKLNQTPFEAFGNDSAKWQKIEVLAKNLPTKKQKRILDKNYKDKEQKNFKDRNLNDTRYIARLVLNYTKDYLDFLPLSDDENTKLNDTQKGSKVHVEAKSGMLTSALRHTWGFSAKDRNNHLHHAIDAVIIAYANNSIVKAFSDFKKEQESNSAELYAKKISELDYKNKRKFFEPFSGFRQKVLDKIDEIFVSKPERKKPSGALHEETFRKEEEFYQSYGGKEGVLKALELGKIRKVNGKIVKNGDMFRVDIFKHKKTNKFYAVPIYTMDFALKVLPNKAVARSKKGEIKDWILMDENYEFCFSLYKDSLILIQTKDMQEPEFVYYNAFTSSTVSLIVSKHDNKFETLSKNQKILFKNANEKEVIAKSIGIQNLKVFEKYIVSALGEVTKAEFRQREDFKK

SEQ ID NO: 328 - protein, 984 aa, Campylobacter coli
MARILAFDIGISSIGWAFSENDELKDCGVRIFTKAENPKTGESLALPRRLARSARKRLARRKARLNHLKHLIANEFKLNYEDYQSFDESLAKAYKGSLISPYELRFRALNELLSKQDFARVILHIAKRRGYDDIKNNGDEEKSEILKAIKQNEEKLVNYQSVGEYLYKEYFQKFKENSKEFINVRNKKESYERCIAQSFLKDELKLIFQKQREFGFSFSKKFEEEVLSVAFYKRALKDFSHLVGNCSFFTDEKRAPKNSPLAFMFVALTRIINLLNNLKNTEGILYTKDDLNTLLNEVLKNGTLTYKQTKKLLGLSDDYEFKGEKGTYFIEFKKYKEFIKALGEHNLSQDNLNEIAKDITLIKDEIKLKKALAKYDLNQNQIDSLSKLEFKDHLNISFKALKLITPLMLEGKKYDEAYNELNLKVAINEDKKDFLPAFNETYYKDEVTNPVVLRAIKEYRKVLNALLKKYGKVHKINIELAREVGKNHSQRAKIEKEQNENYKAKKDAELECEKLGLKINSKNILKLRLFKEQKEFCAYSGEKIKISDLQDEKMLEIDHIYPYSRSFDDSYMNKVLVFTKQNQEKLNQTPFEAFGNDSAKWQKIEVLAKNLPTKKQKRILDKNYKDKEQKDFKDRNLNDTRYIARLVLNYTKDYLDFLPLSDDENTKLNDTQKGSKVHVEAKSGMLTSALRHTWGFSAKDRNNHLHHAIDAVIIAYANNSIVKAFSDFKKEQESNSAELYAKKISELDYKNKRKFFEPFSGFRQKVLDKIDEIFVSKPERKKPSGALHEETFRKEEEFYQSYGGKEGVLKALELGKIRKVNGKIVKNGDMFRVDIFKHKKTNKFYAVPIYTMDFALKVLPNKAVARSKKGEIKDWILMDENYEFCFSLYKDSLILIQTKDMQEPELVYFNAFTSSTVSLIVSKHDNKFETLSKNQKILFKNANEKEVIAKSIGIQNLKVFEKYIVSALGEVTKAEFRQREDFKK

SEQ ID NO: 329 - protein, 984 aa, Campylobacter coli
MARILAFDIGISSIGWAFSENDELKDCGVRIFTKAENPKTGESLALPRRLARSARKRLARRKARLNHLKHLIANEFKLNYEDYQSFDESLAKAYKGSLISPYELRFRALNELLSKQDFARVILHIAKRRGYDDIKNNGDEEKSEILKAIKQNEEKLVNYQSVGEYLYKEYFQKFKENSKEFINVRNKKESYERCIAQSFLKDELKLIFQKQREFGFSFSKKFEEEVLSVAFYKRALKDFSHLVGNCSFFTDEKRAPKNSPLAFMFVALTRIINLLNNLKNTEGILYTKDDLNALLNEVLKNGTLTYKQTKKLLGLSDDYEFKGEKGTYFIEFKKYKEFIKALGEHNLSQDDLNEIAKDITLIKDEIKLKKALAKYDLNQNQIDSLSKLEFKDHLNISFKALKLITPLMLEGKKYDEACNELNLKVAINEDKKDFLPAFNETYYKDEVTNPVVLRAIKEYRKVLNALLKKYGKVHKINIELAREVGKNYSQRAKIEKEQNENYKAKKDAELECEKLGLKINSKNILKLRLFKEQKEFCAYSGEKIKISDLQDEKMLEIDHIYPYSRSFDDSYMNKVLVFTKQNQEKLNQTPFEAFGNDSAKWQKIEVLAKNLPTKKQKRILDKNYKDKEQKNFKDRNLNDTRYIARLVLNYTKDYLDFLPLSDDENTKLNDTQKGSKVHVEAKSGMLTSALRHTWGFSAKDRNNHLHHAIDAVIIAYANNSIVKAFSDFKKEQESNSAELYAKKISELDYKNKRKFFEPFSGFRQKVLDKIDEIFVSKPERKKPSGALHEETFRKEEEFYQSYGGKEGVLKALELGKIRKVNGKIVKNGDMFRVDIFKHKKTNKFYAVPIYTMDFALKVLPNKAVARSKKGEIKDWILMDENYEFCFSLYKDSLILIQTKDMQEPEFVYYNAFTSSTVSLIVSKHDNKFETLSKNQKILFKNANEKEVIAKSIGIQNLKVFEKYIVSALGEVTKAEFRQREDFKK

SEQ ID NO: 330 - protein, 987 aa, Campylobacter coli
MARILAFDIGISSIGWAFSENDELKDCGVRIFTKAENPKTGESLALPRRLARSARKRLARRKARLNHLKHLIANEFKLNYEDYQSFDESLAKAYKGSLISPYELRFRALNELLSKQDFARVILHIAKRRGYDDIKNNGDEEKSEILKAIKQNEEKLVNYQSVGEYLYKEYFQKFKENSKEFINVRNKKESYERCIAQSFLKDELKLIFQKQREFGFSFSKKFEEEVLSVAFYKRALKDFSHLVGNCSFFTDEKRAPKNSPLAFMFVALTRIINLLNNLKNTEGILYTKDDLNTLLNEVLKNGTLTYKQTKKLLGLSDDYEFKGEKGTYFIEFKKYKEFIKALGEHNLSQDNLNEIAKDITLIKDEIKLKKALAKYDLNQNQIDSLSKLEFKDHLNISFKALKLITPLMLEGKKYDEAYNELNLKVAINEDKKDFLPAFNETYYKDEVTNPVVLRAIKEYRKVLNALLKKYGKVHKINIELAREVGKNHSQRAKIEKEQNENYKAKKDAELECEKLGLKINSKNILKLRLFKEQKEFCAYSGEKIKISDLQDEKMLEIDHIYPYSRSFDDSYMNKVLVFTKQNQEKLNQTPFEAFGNDSAKWQKIEVLAKNLPTKKQKRILDKNYKDKEQKDFKDRNLNDTRYIARLVLNYTKDYLDFLPLSDDENTKLNDTQKGSKVHVEAKSGMLTSALRHTWGFSAKDRNNHLHHAIDAVIIAYANNSIVKAFSDFKKEQESNSAELYAKKISELDYKNKRKFFEPFSGFRQKVLDKIDEIFVSKPERKKPSGALHEETFRKEEEFYQSYGGKEGVLKALELGKIRKVNGKIVKNGDMFRVDIFKHKKTNKFYAVPIYTMDFALKVLPNKAVARSKKGEIKDWILMDENYEFCFSLYKDSLILIQTKDMQEPELVYFNAFTSSTVSLIVSKHDNKFETLSKNQKILFKNANEKEVIAKSIGIQNLKVFEKYIVSALGEVTKAEFRQREDFKNELR

SEQ ID NO: 331 - protein, 984 aa, Campylobacter coli
MARILAFDIGISSIGWAFSENDELKDCGVRIFTKAENPKTGESLALPRRLARSARKRLARRKARLNHLKHLIANEFKLNYEDYQSFDESLAKAYKGSLISPYELRFRALNELLSKQDFARVILHIAKRRGYDDIKNNGDEEKSEILKAIKQNEEKLVNYQSVGEYLYKEYFQKFKENSKEFINVRNKKESYERCIAQSFLKDELKLIFQKQREFGFSFSKKFEEEVLSVAFYKRALKDFSHLVGNCSFFTDEKRAPKNSPLAFMFVALTRIINLLNNLKNTEGILYTKDDLNTLLNEVLKNGTLTYKQTKKLLGLSDDYEFKGEKGTYFIEFKKYKEFIKALGEHNLSQDNLNEIAKDITLIKDEIKLKKALAKYDLNQNQIDSLSKLEFKDHLNISFKALKLITPLMLEGKKYDEAYNELNLKVAINEDKKDFLPAFNETYYKDEVTNPVVLRAIKEYRKVLNALLKKYGKVHKINIELAREVGKNHSQRAKIEKEQNENYKAKKDAELECEKLGLKINSKNILKLRLFKEQKEFCAYSGEKIKISDLQDEKMLEIDHIYPYSRSFDDSYMNKVLVFTKQNQEKLNQTPFEAFGNDSAKWQKIEVLAKNLPTKKQKRILDKNYKDKEQKDFKDRNLNDTRYIARLVLNYTKDYLDFLPLSNDENTKLNDTQKGSKVHVEAKSGMLTSALRHTWGFSAKDRNNHLHHAIDAVIIAYANNSIVKAFSDFKKEQESNSAELYAKKISELDYKNKRKFFEPFSGFRQKVLDKIDEIFVSKPERKKPSGALHEETFRKEEEFYQSYGGKEGVLKALELGKIRKVNGKIVKNGDMFRVDIFKHKKTNKFYAVPIYTMDFALKVLPNKAVARSKKGEIKDWILMDENYEFCFSLYKDSLILIQTKDMQEPELVYFNAFTSSTVSLIVSKHDNKFETLSKNQKILFKNANEKEVIAKSIGIQNLKVFEKYIVSALGEVTKAEFRQREDFKK

SEQ ID NO: 332 - protein, 987 aa, Campylobacter coli
MARILAFDIGISSIGWAFSENDELKDCGVRIFTKAENPKTGESLALPRRLARSARKRLARRKARLNHLKHLIANEFKLNYEDYQSFDESLAKAYKGSLISPYELRFRALNELLSKQDFARVILHIAKRRGYDDIKNSDDKEKGAILKAIKQNEEKLANYQSVGEYLYKEYFQKFKENSKEFTNVRNKKESYERCIAQSFLKDELKLIFKKQREFGFSFSKKFEEEVLSVAFYKRALKDFSHLVGNCSFFTDEKRAPKNSPLAFMFVALTRIINLLNNLKNTEGILYTKDDLNALLNEVLKNGTLTYKQTKKLLGLSDDYEFKGEKGTYFIEFKKYKEFIKALGDHSLSQDDLNEIAKDITLIKDEIKLKKALAKYDLNQNQIDSLSKLEFKDHLNISFKALKLITPLMLEGKKYDEACNELNLKVAINEDKKDFLPAFNETYYKDEVTNPVVLRAIKEYRKVLNALLKKYGKVHKINIELAREVGKNYSQRAKIEKEQNENYKAKKDAELECEKLGLKINSKNILKLRLFKEQKEFCAYSGEKIKISDLQDEKMLEIDHIYPYSRSFDDSYMNKVLVFTKQNQEKLNKTPFEAFGNDSTKWQKIEVLAKNLPEKKQKRILDKNYKDKEQKDFKDRNLNDTRYIARLVLNYTKDYLDFLPLSDDENTKLNDTQKGSKVHVEAKSGMLTSALRHTWGFSTKDRNNHLHHAIDAVIIAYANNSIVKAFSDFKKEQESNSAELYAKKISELDYKNKRKFFEPFSGFRQKVLDKIDEIFVSKPERKKPSGALHEETFRKEEEFYQSYGGKEGVLKALELGKIRKVNGKIVKNGDMFRVDIFKHKKTNKFYAVPIYTMDFALKVLPNKAVARSKKGEIKDWILMDENYEFCFSLYKDSLILIQTKDMQEPEFVYYNAFTSSTVSLIVSKHDNKFETLSKNQKILFKNANEKEVIAKSIGIQNLKVFEKYIVSALGEVTKAEFRQREDFKNELR

SEQ ID NO: 333 - protein, 984 aa, Campylobacter coli
MARILAFDIGISSIGWAFSENDELKDCGVRIFTKAENPKTGESLALPRRLARSARKRLARRKARLNHLKHLIANEFKLNYEDYQSFDESLAKAYKGSLISPYELRFRALNELLSKQDFARVILHIAKRRGYDDIKNSDDKEKGAILKAIKQNEEKLTNYQSVGEYLYKEYFQKFKENSKEFTNVRNKKESYERCIAQSFLKDELKLIFKKQREFGFSFSKKFEEEVLSVAFYKRALKDFSHLVGNCSFFTDEKRAPKNSPLAFMFVALTRIINLLNNLKNTEGILYTKDDLNALLNEVLKNGTLTYKQTKKLLGLSDDYEFKGEKGTYFIEFKKYKEFIKALGDHSLSQDDLNEIAKDITLIKDEIKLKKALAKYDLNQNQIDSLSKLEFKDHLNISFKALKLITPLMLEGKKYDEACNELNLKVAINEDKKDFLPAFNETYYKDEVTNPVVLRAIKEYRKVLNALLKKYGKVHKINIELAREVGKNYSQRAKIEKEQNENYKAKKDAELECEKLGLKINSKNILKLRLFKEQKEFCAYSGEKIKISDLQDEKMLEIDHIYPYSRSFDDSYMNKVLVFTKQNQEKLNQTPFEAFGNDSAKWQKIEVLAKNLPTKKQKRILDKNYKDKEQKDFKDRNLNDTRYIARLVLNYTKDYLDFLPLSDDENTKLNDTQKGSKVHVEAKSGMLTSALRHTWGFSAKDRNNHLHHAIDAVIIAYANNSIVKAFSDFKKEQESNSAELYAKKISELDYKNKRKFFEPFSGFRQKVLDKIDEIFVSKPERKKPSGALHEETFRKEEEFYQSYGGKEGVLKALELGKIRKVNGKIVKNGDMFRVDIFKHKKTNKFYAVPIYTMDFALKVLPNKAVARSKKGEIKDWILMDENYEFCFSLYKDSLILIQTKDMQEPEFVYYNAFTSSTVSLIVSKHDNKFETLSKNQKILFKNANEKEVIAKSIGIQNLKVFEKYIVSALGEVTKAEFRQREDFKK

SEQ ID NO: 334 - protein, 965 aa, Campylobacter coli
MKIIGFNLGIANIGWALRENDEIIDCGVRVFDIPENPKNGNSLALERRENKARMKIVKRKKARMLATKTFLKKELNVDLSKLFLIGSTQSIYELRTKALSSLISKEELSAIILHIAKHRGYDDSALKNENGTIIEALNKNKEAMLKFKSVGEYFYKNFVQNKEVKKIRNTTEDYSNSVPRSLLKQELDLILDKQKELGLIKNADFKAKLFEIIFFKRPLKDFSNKIGNCIFFENEKRAAKNTISACEFVALGKVVNLLKSIEKDIGIVYEKDSINEIMSIILDKTSISYKKIRDILNLPQDINFKGLDYSKNNVENSKLVDLKKLNEFKKALGDGFTNLDKDILDSIATDITLTKDTATLKEKLKNYNVLNAEQIEKLSELVFNDHINLSLKALKQIIPLMYEGKRYDEACELCNFTIAKNQEKNEYLPLFEKTRFAKDISSPVVIRAICEFRKLLNDIIRRYGSVHKIHLELTRDFGISFNDRKKIIKEIEQNEQSRIKALETIKELKLEETSKNIQIVRLFEDQKGICPYSGLKMDLKCLDELVIDYIRPYNRSLDDSYSNKVLTFKKLNDLKQGKTPFEAFGEDEKLWAEINERIKEYNGKKRFKIFDKFFKDKKPFDFTEQTLQDTRWLTKLVASYLNEYLSFLPISEDENTALGYGEKGSKQHVILSSGMITQMLRNFWYLGFKNHKDYKNNAMDAIIVAFTTNSIIFTFNNFKKELDLAKAEFYANKISESDYLLKRKFLPPFSGFKEQALEKVKNIFVSHSLKIKNKGTLHELTPLKIKELKNTYGDLDLAVKLGKIRKYNDKYYANAKGSLVRTDLFADKENKFHAVSIYKADFSTKKLPNKTPATTSNGETKEGIEMNENYNFCMSLYKNTPISVKIKGMKEPIICYYHGFNTSGSKITYKKHDNNYHNLSEDEMVVFRKNDKESIVVGKILEIKKYSISPSGELSLIENEERKWF

SEQ ID NO: 335 - protein, 965 aa, Campylobacter coli
MKIIGFNLGIANIGWALRENDEIIDCGVRVFDIPENPKNGNSLALERRENKARMKIVKRKKARMLATKTFLKKELNVDLSKLFLIGSTQSIYELRTKALSSLISKEELSAIILHIAKHRGYDDSALKNENGTIIEALNKNKEAMLKFKSVGEYFYKNFVQNKEVKKIRNTTEDYSNSVPRSLLKQELDLILDKQKELGLIKNADFKAKLFEIIFFKRPLKDFSNKIGNCIFFENEKRAAKNTISACEFVALGKVVNLLKSIEKDIGIVYEKDSINEIMSIILDKTSISYKKIRDILNLPQDINFKGLDYSKNNAENSKLVDLKKLNEFKKALGDGFANLDKDILDSIATDITLTKDTATLKEKLKNYNVLNAEQIEKLSELVFNDHINLSLKALKQIIPLMYEGKRYDEACELCNFTIAKNQEKNEYLPLFEKTRFAKDISSPVVIRAICEFRKLLNDIIRRYGSVHKIHLELTRDFGISFNDRKKIIKEIEQNEQSRIKALETIKELKLEETSKNIQIVRLFEDQKGICPYSGLKMDLKCLDELVIDYIRPYNRSLDDSYSNKVLTFKKLNDLKQGKTPFEAFGEDEKLWAEINERIKEYNGKKRFKIFDKFFKDKKPFDFTEQTLQDTRWLTKLVASYLNEYLSFLPISEDENTALGYGEKGSKQHVVLSSGMITQMLRNFWYLGFKNHKNYKNNAMDAIIVAFTTNSIIFAFNNFKKELDLAKAEFYANKISESDYLLKRKFLPPFSGFKEQALEKVKNIFVSHSLKIKNKGTLHELTPLKIKELKNTYGDLDLAVKLGKIRKYNDKYYANTKGSLVRTDLFVDKENKFHAVSIYKADFSTKKLPNKTPATTSNGETKEGIEMNENYNFCMSLYKNTPVSVKIKGMKEPIICYYHGFNTSGSKITYKKHDNNYHNLSEDEMVVFRKNDKESIVVGKILEIKKYSISPSGELSLIENEKRKWF

SEQ ID NO: 336 - protein, 965 aa, Campylobacter coli
MKIIGFNLGIANIGWALRENDEIIDCGVRVFDIPENPKNGNSLALERRENKARMKIVKRKKARMLATKTFLKKELNVDLSKLFLIGSTQSIYELRTKALSSLISKEELSAIILHIAKHRGYDDSALKNENGTIIEALNKNKEAMLKFKSVGEYFYKNFVQNKEVKKIRNTTEDYSNSVPRSLLKQELDLILDKQKELGLIKNADFKEKLFEIIFFKRPLKDFSNKIGNCIFFENEKRAAKNTISACEFVALGKVVNLLKSIEKDIGIVYEKDSINEIMSIILDKTSISYKKIRDILNLPQDINFKGLDYSKNNAENSKLVDLKKLNEFKKALGDGFANLDKDILDSIATDITLTKDTATLKEKLKNYNVLNAEQIEKLSELVFNDHINLSLKALKQIIPLMYEGKRYDEACELCNFTIAKNQEKNEYLPLFEKTRFAKDISSPVVIRAICEFRKLLNDIIRRYGSVHKIHLELTRDFGISFNDRKKIIKEIEQNEQSRIKALETIKELKLEETSKNIQIVRLFEDQKGICPYSGLKMDLKCLDELVIDYIRPYNRSLDDSYSNKILTFKKLNDLKQGKTPFEAFGEDEKLWAEINERIKEYNGKKRFKIFDKFFKDKKPFDFTEQTLQDTRWLTKLVASYLNEYLLFLPINEDENTALGYGEKGSKQHVVLSSGMITQMLRNFWYLGFKNHKDYKNNAMDAIIVAFTTNSIIFAFNNFKKELDLAKAEFYANKISESDYLLKRKFLPPFSGFKEQALEKVKNIFVSHSLKIKNKGTLHELTPLKIKELKNTYGDLDLAVKLGKIRKYNDKYYANAKGSLVRTDLFADKENKFHAVSIYKADFSTKKLPNKTPATTSNGETKEGIEMNENYNFCMSLYKNTPISVKIKGMKEPIICYYHGFNTSGSKITYKKHDNNYHNLSEDEMVVFRKNDKESIVVGKILEIKKYSISPSGELSLIENEERKWF

SEQ ID NO: 337 - protein, 933 aa, Campylobacter coli
MKIIGFNLGIANIGWALRENDEIIDCGVRVFDIPENPKNGNSLALERRENKARMKIVKRKKARMLATKTFLKKELNVDLSKLFLIGSTQSIYELRTKALSSLISKEELSVIILHIAKHRGYDDSALKNENGTIIEALNKNKETMLKFKSVGEYFYKNFVQNKEVKKIRNTTEDYSNSVPRSLLKQELDLILDRQKELGLIKNADFKAKLFEIIFFKRPLKDFSNKIGNCIFFENEKRAAKNTISACEFVALGKVVNLLKSIEKDIGIVYEKDSINEIMSIILDKTSISYKKIRDILNLPQDINFKGLDYSKNNVENSKLVDLKKLNEFKKALGDGFTNLDKDILDSIATDITLTKDTATLKEKLKNYNVLNAEQIEKLSELVFNDHINLSLKALKQIIPLMYEGKRYDEACELCNFTIAKNQEKNEYLPLFEKTRFAKDISSPVVIRAICEFRKLLNDIIRRYGSVHKIHLELTRDFGISFNDRKKIIKEIEQNEQSRIKALETIKELKLEETSKNIQIVRLFEDQKGICPYSGLKMDLKCLDELVIDYIRPYNRSLDDSYSNKVLTFKKLNDLKQGKTPFEAFGEDEKLWAEINERIKEYNGKKRFKIFDKFFKDKKPFDFTEQTLQDTRWLTKLVASYLNEHLSFLPISEDENTALGYGEKGSKQHVILSSGMITQMLRNFWYLGFKNHKDYKNNAMDAIIVAFTTNSIIFTFNNFKKELDLAKAEFYANKISESDYLLKRKFLPPFSGFKEQALEKVKNIFVSHSLKIKNKGTLHELTPLKIKELKNTYGDLDLAVKLGKIRKYNDKYYANANGSLVRSDLFIDKKNKFHAVPIYKADFSTKKLPNKTPATTSNGETKEGIEMNENYNFCMSLYKNTPISVKIKGMKESIICYYHGFNTSGSKITYKKHDNNYHNLSEDEMVVFRKNDKE

SEQ ID NO: 338 - protein, 666 aa, Campylobacter jejuni
KGEKGTYFIEFKKYKEFIKALDEHSLSQDDLNEIAKDITLIKDEIKLKKALAKYDLKENQIDSLSKLEFKDHLNISFKALKLITPLMLEGKKYDEACNELNLKVAINEDKKDFLPAFNETYYKDEVTNPVVLRAIKEYRKILNALLKKYGKVHKINIELAREVGKNHSQRAKIEKEQNENYKAKKDAELECEKLGLKINSKNILKLRLFKEQKEFCVYSGEKIKLSDLQDEKMLEIDHIYPYSRSFDDSYMNKVLVFAKQNQEKLNKTPFEAFGNDSTKWQKIEVLTKNLPTKKQKRILDKNYKDKEQKDFKDRNLNDTRYIARLVLNYTKDYLDFLPLSDDENTKLNDTQKGSKVHVEAKSGMLTSALRHTWGFSTKDRNNHLHHAIDAAIIAYANNSIVKAFSDFKKEQESNSAELYAKKISELDYKNKRKFFEPFSGFRQKVLDKIDEIFVSKPERKKPSGALHEETFRKEEEFYQSYGGKEGVLKALELGKIRKVNGKIVKNGDMFRVDIFKHKKTNKFYAVPIYTMDFALKVLPNKAVARSKKGEIKDWILMDEDYEFCFSLYKDSLILIQTKDMQEPELVYFNAFTSSTVSLIVSKHDNKFETLSKNQKILFKNANEKEVIAKSIGIQNLKVFEKYIVSALGEVTKAEFRQREDFKNELR

SEQ ID NO: 339 - protein, 190 aa, Campylobacter jejuni
MAFDIGISSIGWAFSENDELKDCGVRIFTKVENPKTGESLALPRRLARSARKRLARRKARLNHLKHLIANEFKLNYEDYQSFDESLAKAYKGSLISPYELRFRALNELLSKQDFARVILHIAKRRGYDDIKNSDDKEKGAILKAIKQNEEKLANYQSVGEYLYKEYFQKFKENSKEFTNVRNKKKVMNAA

SEQ ID NO: 340 - protein, 985 aa, Campylobacter jejuni
MAKILAFDIGISSIGWAFVENDELKDCGVRIFTKAENPKTGESLALPRRLARSARKRLARRKARLNHLKHLIANEFKLNYEDYQSFDESLAKAYKGTLISPYELRFKALNELLSKQDLARVILHIAKRRGYDNIKNSDDKEKGAILKAVKENEEKLANYKSVGEYLYKEYFQKFKENSKEFINVRNKKESYERCIAQSFLKDELKLIFQKQREFGFNFSKKFEEEVLSVAFYKRALKDFSHLVGNCSFFVDEKRAPKNSPLAFEFVALTRIVNLLNNLNKNNSYIKDDLNALLSEVLKNGTLTYKQTKKILGLSDDYEFKGQKGNYFIEFKKYKEFIKALCEHNLNQDDLNEIAKDITLVKDETKLKKALAKYDLNQNQIENLSKIEFKDHLNISFKALKLIVPLMREGKKYDEVCNELNLKTAINEDKKEFLPAFNETYYKDEVNNPVVLRAIKEYRKVLNSLLKKYGKVHKINIELAREVGKNHRERSKIEKEQNENFKAKKDAELECEKLGLKINSKNILKLRLFKEQKEFCVYSGEKIKISDLQDEKMLEIDHIYPYSRSFDDSYMNKVLVFTKQNQEKLNKTPFEAFGKDDVKWQKIETLAKNLPAKKQKRILDKNYKDKEQKDFKDRNLNDTRYIARLVLNYTKDYLEFLPLSDDENIKLNDTQKGSKVHVEAKSGMLTSVLRHTWGFSTKDRNNHLHHAIDAVIIAYANASVVKAFSDFKKEQENYTAELYAKKINELDFKNKRKFFEPFSNFRQKVLEKIDEIFVSKPERKKPSGALHEETFYKEEEFYKEYGGKEGVLKALELGKIRKVNGKIVSNANMFRVDIFKYKKTNKFYAVPIYTMDFALGILPNKAVVGGKDKQGIIKDWLLMDENYEFCFSLYKDSLILLQTKDMQEPELVYFKSFKSSTAGLVVSKHDNKFENLNENQKKLFKSANEKKVVAEGIGIQNLKVFEKYIVSALGEITKAEIKERENFKKK

SEQ ID NO: 341 - protein, 987 aa, Campylobacter jejuni
MARILAFDIGISSIGWAFSENDELKDCGVRIFTKAENPKTGESLALPRCLARSARKRLARRKARLNHLKHLIANEFKLNYEDYQSFDESLAKAYKGSLISPYELRFRALNELLSKQDFARVILHIAKRRGYDDIKNNGDEEKGEILKAIKQNEEKLVSYQSVGEYLYKEYFQKFKENSKEFINVRNKKESYERCIAQSFLKDELKLIFQKQRKFGFSFSKKFEEEVLSVAFYKRALKDFSHLVGNCSFFTDEKRAPKNSPLAFMFVALTRIINLLNNLKNTEGILYTKDDLNTLLNEVLKNGTLTYKQTKKLLGLSNDYEFKGEKGTYFIEFQKYKEFVKALGEHNLSQDDLNEIAKDITLIKDEIKLKKALAKYDLNQNQIDSLSKLEFKDHLNISFKALKLITPLMLEGKKYDEACNELNLKVAINEDKKDFLPAFNETYYKDEVTNPVVLRAIKEYRKVLNALLKKYGKVHKINIELAREVGKNHSQRAKIEKEQNENYKAKKDAELECEKLGLKINSKNILKLRLFKEQKEFCVYSGEKIKISDLQDEKMLEIDHIYPYSRSFDDSYMNKVLVFTKQNQEKLNKTPFETFGNDRVKWQKIEVLAKNLPTKKQKRILDKNYKDKEQKDFKDRNLNDTRYIARLVLNYTKDYLDFLPLSDDENTKLNDTQKGSKVHVEAKSGMLTSTLRHTWGFSTKDRNNHLHHAIDAAIIAYANNSIVKAFSDFKKEQESNTAELYAKKISELDYKNKRKFFEPFSGFRQKLLDKIDEIFVSKPERKKPSGALHEETFRKEEEFYQSYGGKEGVLKALELGKIRKVNGKIVSNGDMFRVDIFKHKKTNKFYAVPIYTMDFALKVLPNKAVVQGKDKKSGLIKDWILMDENYEFCFSLYKDSLILIQTKDMQEPELVYYERLDSSNASLTVSKHDNKFETLSKNQKILFKNANEKEVIAKSIGIQNLKVFEKYIVSALGEVTKAEFRQREDFKK

SEQ ID NO: 342 - protein, 987 aa, Campylobacter jejuni
MARILAFDIGISSIGWAFSENDELKDCGVRIFTKAENPKTGESLALPRRLARSARKRLARRKARLNHLKHLIANEFKLNYEDYQSFDEGLAKAYKGSLISPYELRFRALNELLSKQDFARVILHIAKRRGYDDIKNNGDEEKSEILKAIKQNEEKLVNYQSVGEYLYKEYFQKFKENSKEFINVRNKKESYERCIAQSFLKDELKLIFQKQREFGFSFSKKFEEEVLSVAFYKRALKDFSHLVGNCSFFTDEKRAPKNSPLAFMFVALTRIINLLNNLKNTEGILYTKDDLNTLLNEVLKNGTLTYKQTKKLLGLSDDYEFKGEKGTYFIEFKKYKEFIKALGEHNLSQDNLNEIAKDITLIKDEIKLKKALAKYDLNQNQIDSLSKLEFKDHLNISFKALKLITPLMLEGKKYDEAYNELNLKVAINEDKKDFLPAFNETYYKDEVTNPVVLRAIKEYRKVLNALLKKYGKVHKINIELAREVGKNHSQRAKIEKEQNENYKAKKDAELECEKLGLKINSKNILKLRLFKEQKEFCAYSGEKIKISDLQDEKMLEIDHIYPYSRSFDDSYMNKVLVFTKQNQEKLNQTPFEAFGNDSAKWQKIEVLAKNLPTKKQKRILDKNYKDKEQKDFKDRNLNDTRYIARLVLNYTKDYLDFLPLSDDENTKLNDTQKGSKVHVEAKSGMLTSALRHTWGFSAKDRNNHLHHAIDAVIIAYANNSIVKAFSDFKKEQESNSAELYAKKISELDYKNKRKFFEPFSGFRQKVLDKIDEIFVSKPERKKPSGALHEETFRKEEEFYQSYGGKEGVLKALELGKIRKVNGKIVKNGDMFRVDIFKHKKTNKFYAVPIYTMDFALKVLPNKAVVQGKDKKSGLIKDWILMDENYEFCFSLYKDSLILIQTKDMQEPELVYFNAFTSSTVSLIVSKHDNKFETLSKNQKILFKNANEKEVIAKSIGIQNLKVFEKYIVSALGEVTKAEFRQREDFKK

SEQ ID NO: 343 - protein, 961 aa, Campylobacter jejuni
MARILAFDIGISSIGWAFSENDELKDCGVRIFTKAENPKTGESLALPRRLARSARKRLARRKARLNHLKHLIANEFKLNYEDYQSFDESLAKAYKGSLISPYELRFRALNELLSKQDFARVILHIAKRRGYDDIKNNGDEEKGKILKAIKQNEEKLVNYQSVGEYLYKEYFQKFKENSKEFINVRNKKESYERCITQSFLKYELKLIFQKQREFGFSFSKKFEEEVLSVAFYKRALKDFSHLVGNCSFFSDEKRAPKNSPLAFMFVALTRIINLLNNLKNTEGILYTKDDLNALLNEVLKNGTLTYKQTKKLLGLSDDYEFKGEKGTYFIEFKKYKEFIKALGEHNLSQDDLNEIAKDITLIKDEIKLKKALAKYDLNQNQIDSLSKLEFKDHLNIGFKALKLITPLMLEGKKYDEACNELNLKVAINEDKKDFLPAFNETYYKDEVTNPVVLRAIKEYRKVLNALLKKYGKVHKINIELAREVGKNHSQRAKIEKEQNENYKAKKDAELECEKLGLKINSKNILKLRLFKEQKEFCAYSGEKIKLSDLQDEKMLEIDHIYPYSRSFDDSYMNKVLVFTKQNQEKLNKTPFEAFGNDNVKWQKIEVLAKNLPEKKQKRILDKNYKDKEQKDFKDRNLNDTRYIARLVLNYTKDYLDFLPLSDDENTKLKGSKVHVEAKSGMLTSALRHTWGFSTKDRNNHLHHAIDAAIIAYANNSIVKDFSDFKKEQESNSAELYAKKISELDYKNKRKFFEPFSGFRQKVLDKIDEIFVSKPERKKPSGALHEETFRKEEEFYQSYGGKEGVLKALELGKIRKVNGKIVKNGDMFRVDIFKHKKTNKFYAVPIYTMDFALKVLPNKAVARSKKGEIKDWILMDENYEFCFSLYKDSLILIQTKDMQEPELVYFNAFTSSTVSLIVSKHDNKFETLSKNLKVFEKYIVSALGEVTKAEFRQREDFKNELR

SEQ ID NO: 344 - protein, 984 aa, Campylobacter jejuni
MARILAFDIGISSIGWAFSENDELKDCGVRIFTKAENPKTGESLALPRRLARSARKRLARRKARLNHLKHLIANEFKLNYEDYQSFDESLAKAYKGSLISPYELRFRALNELLSKQDFARVILHIAKRRGYDDIKNNGDEEKGKILKAIKQNEEKLVNYQSVGEYLYKEYFQKFKENSKEFINVRNKKESYERCITQSFLKYELKLIFQKQREFGFSFSKKFEEEVLSVAFYKRALKDFSHLVGNCSFFTDEKRAPKNSPLAFMFVALTRIINILNNLKNTEGILYTKDDLNALLNEVLKNGTLTYKQTKKLLGLSDDYEFKGEKGTYFIEFKKYKEFIKALGEHNLSQDDLNEIAKDITLIKDEIKLKKALAKYDLNQNQIDSLSKLEFKDHLNISFKALKLITPLMLEGKKYDEACNELNLKVAINEDKKDFLPAFNETYYKDEVTNPVVLRAIKEYRKILNALLKKYGKVHKINIELAREVGKNHSQRAKIEKEQNENYKAKKDAEIECEKLGLKINSKNILKLRLFKEQKEFCAYSGEKIKISDLQDEKMLEIDHIYPYSRSFDDSYMNKVLVFTKQNQEKLNQTPFEAFGNDSAKWQKIEVLAKNLPTKKQKRILDKNYKDKEQKDFKDRNLNDTRYIARLVLNYTKDYLDFLPLSDDENTKLNDTQKGSKVHVEAKSGMLTSALRHTWGFSAKDRNNHLHHAIDAVIIAYANNSIVKAFSDFKKEQESNSAELYAKKISELDYKNKRKFFEPFSGFRQKVLDKIDEIFVSKPERKKPSGALHEETFRKEEEFYQSYGGKEGVLKALELGKIRKVNGKIVKNGDMFRVDIFKHKKTNKFYAVPIYTMDFALKVLPNKAVARSKKGEIKDWILMDENYEFCFSLYKDSLILIQTKDMQEPEFVYYNAFTSSTVSLIVSKHDNKFETLSKNQKILFKNANEKEVIAKSIGIQNLKVFEKYIVSALGEVTKAEFRQREDFKK

SEQ ID NO: 345 - protein, 987 aa, Campylobacter jejuni
MARILAFDIGISSIGWAFSENDELKDCGVRIFTKAENPKTGESLALPRRLARSARKRLARRKARLNHLKHLIANEFKLNYEDYQSFDESLAKAYKGSLISPYELRFRALNELLSKQDFARVILHIAKRRGYDDIKNNGDEEKGKILKAIKQNEEKLVSYQSVGEYLYKEYFQKFKENSKEFINVRNKKESYERCIAQSFLKDELKLIFQKQREFGFSFSKKFEEEVLSVAFYKRALKDFSHLVGNCSFLLMKKERQKNSPLAFMFVALTRIINLLNNLKNTEGILYTKDDLNTLLNEALKNGTLTYKQTKKLLGLSNDYEFKGEKGTYFIEFQKYKEFVKALGEHNLSQDDLNEIAKDITLIKDEIKLKKALAKYDLNQNQIDSLSKLEFKDHLNISFKALKLITPLMLEGKKYDEACNELNLKVAINEDKKDFLPAFNETYYKDEVTNPVVLRAIKEYRKVLNALLKKYGKVHKINIELAREVGKNHSQRAKIEKEQNENYKAKKDAELECEKLGLKINSKNILKLRLFKEQKEFCVYSGEKIKISDLQDEKMLEIDHIYPYSRSFDDSYMNKVLVFTKQNQEKLNKTPFETFGNDRVKWQKIEVLAKNLPTKKQKRILDKNYKDKEQKDFKDRNLNDTRYIARLVLNYTKDYLDFLPLSDDENTKLNDTQKGSKVHVEAKSGMLTSTLRHTWGFSTKDRNNHLHHAIDAAIIAYANNSIVKAFSDFKKEQESNTAELYAKKISELDYKNKRKFFEPFSGFRQKLLDKIDEIFVSKPERKKPSGALHEETFRKEEEFYQSYGGKEGVLKALELGKIRKVNGKMVKNGDMFRVDIFKHKKTNKFYAVPIYTMDFALKVLPNKAVVQGKDKKSGLIKDWILMDENYEFCFSLYKDSLILIQTKDMQEPELVYYERLDSSNASLTVSKHDNKFETLSKNQKILFKNANEKEVIAKSIGIQNLKVFEKYIVSALGEVTKAEFRQREDFKK

SEQ ID NO: 346 - protein, 987 aa, Campylobacter jejuni
MARILAFDIGISSIGWAFSENDELKDCGVRIFTKAENPKTGESLALPRRLARSARKRLARRKARLNHLKHLIANEFKLNYEDYQSFDESLAKAYKGSLISPYELRFRALNELLSKQDFARVILHIAKRRGYDDIKNNGDEEKSEILKAIKQNEEKLVNYQSVGEYLYKEYFQKFKENSKEFINVRNKKESYERCIAQSFLKDELKLIFQKQREFGFSFSKKFEEEVLSVAFYKRALKDFSHLVGNCSFFTDEKRAPKNSPLAFMFVALTRIINLLNNLKNTEGILYTKDDLNTLLNEVLKNGTLTYKQTKKLLGLSDDYEFKGEKGTYFIEFKKYKEFIKALGEHNLSQDNLNEIAKDITLIKDEIKLKKALAKYDLNQNQIDSLSKLEFKDHLNISFKALKLITPLMLEGKKYDEAYNELNLKVAINEDKKDFLPAFNETYYKDEVTNPVVLRAIKEYRKVLNALLKKYGKVHKINIELAREVGKNHSQRAKIEKEQNENYKAKKDAELECEKLGLKINSKNILKLRLFKEQKEFCAYSGEKIKISDLQDEKMLEIDHIYPYSRSFDDSYMNKVLVFTKQNQEKLNQTPFEAFGNDSAKWQKIEVLAKNLPTKKQKRILDKNYKDKEQKDFKDRNLNDTRYIARLVLNYTKDYLDFLPLSDDENTKLNDTQKGSKVHVEAKSGMLTSALRHTWGFSAKDRNNHLHHAIDAVIIAYANNSIVKAFSDFKKEQESNSAELYAKKISELDYKNKRKFFEPFSGFRQKVLDKIDEIFVSKPERKKPSGALHEETFRKEEEFYQSYGGKEGVLKALELGKIRKVNGKIVKNGDMFRVDIFKHKKTNKFYPVPIYTMDFALKVLPNKAVVQGKDKKSGLIKDWILMDENYEFCFSLYKDSLILIQTKDMQEPELVYFNAFTSSTVSLIVSKHDNKFETLSKNQKILFKNANEKEVIAKSIGIQNLKVFEKYIVSALGEVTKAEFRQREDFKK

SEQ ID NO: 347 - protein, 987 aa, Campylobacter jejuni
MARILAFDIGISSIGWAFSENDELKDCGVRIFTKAENPKTGESLALPRRLARSARKRLARRKARLNHLKHLIANEFKLNYEDYQSFDESLAKAYKGSLISPYELRFRALNELLSKQDFARVILHIAKRRGYDDIKNNGDEEKSEILKAIKQNEEKLVNYQSVGEYLYKEYFQKFKENSKEFINVRNKKESYERCIAQSFLKDELKLIFQKQREFGFSFSKKFEEEVLSVAFYKRALKDFSHLVGNCSFFTDEKRAPKNSPLAFMFVALTRIINLLNNLKNTEGILYTKDDLNTLLNEVLKNGTLTYKQTKKLLGLSDDYEFKGEKGTYFIEFKKYKEFIKALGEHNLSQDNLNEIAKDITLIKDEIKLKKALAKYDLNQNQIDSLSKLEFKDHLNISFKALKLITPLMLEGKKYDEAYNELNLKVAINEDKKDFLPAFNETYYKDEVTNPVVLRAIKEYRKVLNALLKKYGKVHKINIELAREVGKNHSQRAKIEKEQNENYKAKKDAELECEKLGLKINSKNILKLRLFKEQKEFCAYSGEKIKISDLQDEKMLEIDHIYPYSRSFDDSYMNKVLVFTKQNQEKLNQTPFEAFGNDSAKWQKIEVLAKNLPTKKQKRILDKNYKDKEQKDFKDRNLNDTRYIARLVLNYTKDYLDFLPLSDDENTKLNDTQKGSKVHVEAKSGMLTSALRHTWGFSAKDRNNHLHHAIDAVIIAYANNSIVKAFSDFKKEQESNSAELYAKKISELDYKNKRKFFEPFSGFRQKVLDKIDEIFVSKPERKKPSGALHEETFRKEEEFHQSYGGKEGVLKALELGKIRKVNGKIVKNGDMFRVDIFKHKKTNKFYAVPIYTMDFALKVLPNKAVVQGKDKKSGLIKDWILMDENYEFCFSLYKDSLILIQTKDMQEPELVYFNAFTSSTVSLIVSKHDNKFETLSKNQKILFKNANEKEVIAKSIGIQNLKVFEKYIVSALGEVTKAEFRQREDFKK

SEQ ID NO: 348 - protein, 987 aa, Campylobacter jejuni
MARILAFDIGISSIGWAFSENDELKDCGVRIFTKAENPKTGESLALPRRLARSARKRLARRKARLNHLKHLIANEFKLNYEDYQSFDESLAKAYKGSLISPYELRFRALNELLSKQDFARVILHIAKRRGYDDIKNNGDEEKSEILKAIKQNEEKLVNYQSVGEYLYKEYFQKFKENSKEFINVRNKKESYERCIAQSFLKDELKLIFQKQREFGFSFSKKFEEEVLSVAFYKRALKDFSHLVGNCSFFTDEKRAPKNSPLAFMFVALTRIINLLNNLKNTEGILYTKDDLNTLLNEVLKNGTLTYKQTKKLLGLSDDYEFKGEKGTYFIEFKKYKEFIKALGEHNLSQDNLNEIAKDITLIKDEIKLKKALAKYDLNQNQIDSLSKLEFKDHLNISFKALKLITPLMLEGKKYDEAYNELNLKVAINEDKKDFLPAFNETYYKDEVTNPVVLRAIKEYRKVLNALLKKYGKVHKINIELAREVGKNHSQRAKIEKEQNENYKAKKDAELECEKLGLKINSKNILKLRLFKEQKEFCAYSGEKIKISDLQDEKMLEIDHIYPYSRSFDDSYMNKVLVFTKQNQEKLNQTPFEAFGNDSAKWQKIEVLAKNLPTKKQKRILDKNYKDKEQKDFKDRNLNDTRYIARLVLNYTKDYLDFLPLSDDENTKLNDTQKGSKVHVEAKSGMLTSALRHTWGFSAKDRNNHLHHAIDAVIIAYANNSIVKAFSDFKKEQESNSAELYAKKISELDYKNKRKFFEPFSGFRQKVLDKIDEIFVSKPERKKPSGALHEETFRKEEEFYQSYGGKEGVLKALELGKIRKVNGKIVKNGDMFRVDIFKHKKTNKFYAVPIYTMDFALKVLPNKAVVQGKDKKSGLIKDWILMDENYEFCFSLYKDSLILIQTKDMQEPELVYFNAFTSSTVSLIVSKHDNKFETLSKNQKILFKNANEKEVIAKSIGIQNLKVFEKYIVSALGEVTKAEFRQREDFKK

SEQ ID NO: 349 - protein, 861 aa, Campylobacter jejuni
MARILAFDIGISSIGWAFSENDELKDCGVRIFTKAENPKTGESLALPRRLARSARKRLARRKARLNHLKHLIANEFKLNYEDYQSFDESLAKAYKGSLISPYELRFRALNELLSKQDFARVILHIAKRRGYDDIKNNGDEEKSEILKAIKQNEEKLVNYQSVGEYLYKEYFQKFKENSKEFINVRNKKESYERCITQSFLKDELKLIFQKQREFGFSFSKKFEEEVLSVAFYKRALKDFSHLVGNCSFFTDEKRAPKNSPLAFMFVALTRIINILNNLKNTEGILYTKDDLNALLNEVLKNGTLTYKQTKKLLGLSDDYEFKGEKGTYFIEFKKYKEFIKALGEHNLSQDDLNEIAKDITLIKDEIKLKKALAKYDLNQNQIDSLSKLEFKDHLNISFKALKLITPLMLEGKKYDEACNELNLKVAINEDKKDFLPAFNETYYKDEVTNPVVLRAIKEYRKILNALLKKYGKVHKINIELAREVGKNHSQRAKIEKEQNENYKAKKDAEIECEKLGLKINSKNILKLRLFKEQKEFCAYSGEKIKLSDLQDEKMLEIDHIYPYSRSFDDSYMNKVLVFTKQNQEKLNKTPFEAFGNDSTKWQKIEVLAKNLPEKKQKRILDKNYKDKEQKDFKDRNLNDTRYIARLVLNYTKDYLDFLPLSDDENTKLNDTQKGSKVHVEAKSGMLTSALRHTWGFSAKDRNNHLHHAIDAAIIAYANNSIVKAFSDFKKEQESNSVELYAKKISELDYKNKRKFFEPFSGFRQKVLDKIDEIFVSKPERKKPSGALHEETFRKEEEFYQSYGGKEGVLKALELGKIRKVNGKIVKNGDMFRVDIFKHKKTNKFLCCANLYYGFCFKSITK

SEQ ID NO: 350 - protein, 462 aa, Campylobacter jejuni
MARILAFDIGISSIGWAFSENDELKDCGVRIFTKAENPKTGESLALPRRLARSARKRLARRKARLNHLKHLIANEFKLNYEDYQSFDESLAKAYKGSLISPYELRFRALNELLSKQDFARVILHIAKRRGYDDIKNNGDEEKSEILKAIKQNEEKLVNYQSVGEYLYKEYFQKFKENSKEFINVRNKKESYERCITQSFLKDELKLIFQKQREFGFSFSKKFEEEVLSVAFYKRALKDFSHLVGNCSFFTDEKRAPKNSPLAFMFVALTRIINILNNLKNTEGILYTKDDLNALLNEVLKNGTLTYKQTKKLLGLSDDYEFKGEKGTYFIEFKKYKEFIKALGEHNLSQDDLNEIAKDITLIKDEIKLKKALAKYDLNQNQIDSLSKLEFKDHLNISFKALKLITPLMLEGKKYDEACNELNLKVAINEDKKDFLPAFNETYYKDEVTNPVVLRAIKEYRKS

SEQ ID NO: 351 - protein, 984 aa, Campylobacter jejuni
MARILAFDIGISSIGWAFSENDELKDCGVRIFTKAENPKTGESLALPRRLARSARKRLARRKARLNHLKHLIANEFKLNYEDYQSFDESLAKAYKGSLISPYELRFRALNELLSKQDFARVILHIAKRRGYDDIKNNGDEEKSEILKAIKQNEEKLVNYQSVGEYLYKEYFQKFKENSKEFINVRNKKESYERCITQSFLKDELKLIFQKQREFGFSFSKKFEEEVLSVAFYKRALKDFSHLVGNCSFFTDEKRAPKNSPLAFMFVALTRIINLLNNLKNTEGILYTKDDLNALLNEVLKNGTLTYKQTKKLLGLSDDYEFKGEKGTYFIEFKKYKEFIKALDEHSLSQDDLNEIAKDITLIKDEIKLKKALAKYDLNQNQIDSLSKLEFKDHLNISFKALKLITPLMLEGKKYDEACNELNLKVAINEDKKDFLPAFNETYYKDEVTNPVVLRAIKEYRKILNALLKKYGKVHKINIELAREVGKNHSQRAKIEKEQNENYKAKKDAEIECEKLGLKINSKNILKLRLFKEQKEFCAYSGEKIKISDLQDEKMLEIDHIYPYSRSFDDSYMNKVLVFTKQNQEKLNKTPFEAFGNDGVKWQKIEVLAKNLPEKKQKRILDKNYKDKEQKDFKDRNLNDTRYIARLVLNYTKDYLDFLPLSDDENTKLNDTQKGSKVHVEAKSGMLTSALRHTWGFSTKDRNNHLHHAIDAAIIAYANNSIVKAFSDFKKEQESNSAELYAKKISELDYKNKRKFFEPFSGFRQKVLDKIDEIFVSKPERKKPSGALHEETFRKEEEFYQSYGGKEGVLKALELGKIRKVNGKIVKNGDMFRVDIFKHKKTNKFYAVPIYTMDFALKVLPNKAVARSKKGEIKDWILMDENYEFCFSLYKDSLILIQTKDMQEPELVYFNAFTSSTVSLVVSKHDNKFETLSKNQKILFKNANEKEVIAKSIGIQNLKVFEKYIVSALGEVTKAEFRQREDFKK

SEQ ID NO: 352 - protein, 984 aa, Campylobacter jejuni
MARILAFDIGISSIGWAFSENDELKDCGVRIFTKAENPKTGESLALPRRLARSARKRLARRKARLNHLKHLIANEFKLNYEDYQSFDESLAKAYKGSLISPYELRFRALNELLSKQDFARVILHIAKRRGYDDIKNSDDKEKGAILKAIKQNEEKLANYQSVGEYLYKEYFQKFKENSKEFTNVRNKKESYERCIAQSFLKDELKLIFKKQREFGFSFSKKFEEEVLSVAFYKRALKDFSHLVGNCSFFTDEKRAPKNSPLAFMFVALTRIINLLNNLKNTEGILYTKDDLNALLNEVLKNGTLTYKQTKKLLGLSDDYEFKGEKGTYFIEFKKYKEFIKALGDHSLSQDDLNEIAKDITLIKDEIKLKKALAKYDLNQNQIDSLSKLEFKDHLNISFKALKLITPLMLEGKKYDEACNELNLKVAINEDKKDFLPAFNETYYKDEVTNPVVLRAIKEYRKVLNALLKKYGKVHKINIELAREVGKNYSQRAKIEKEQNENYKAKKDAELECEKLGLKINSKNILKLRLFKEQKEFCAYSGEKIKISDLQDEKMLEIDHIYPYSRSFDDSYMNKVLVFTKQNQEKLNQTPFEAFGNDSAKWQKIEVLAKNLPTKKQKRILDKNYKDKEQKDFKDRNLNDTRYIARLVLNYTKDYLDFLPLSDDENTKLNDTQKGSKVHVEAKSGMLTSALRHTWGFSAKDRNNHLHHAIDAVIIAYANNSIVKAFSDFKKEQESNSAELYAKKISELDYKNKRKFFEPFSGFRQKVLDKIDEIFVSKPERKKPSGALHEETFRKEEEFYQSYGGKEGVLKALELGKIRKVNGKIVKNGDMFRVDIFKHKKTNKFYAVPIYTMDFALKVLPNKAVARSKKGEIKDWILMDENYEFCFSLYKDSLILIQTKDMQEPEFVYYNAFTSSTVSLIVSKHDNKFETLSKNQKILFKNANEKEVIAKSIGIQNLKVFEKYIVSALGEVTKAEFRQREDFKK

SEQ ID NO: 353 - protein, 984 aa, Campylobacter jejuni
MARILAFDIGISSIGWAFSENDELKDCGVRIFTKAENPKTGESLALPRRLARSARKRLARRKARLNHLKHLIANEFKLNYEDYQSFDESLAKAYKGSLISPYELRFRALNELLSKQDFARVILHIAKRRGYDDIKNSDDKEKGAILKAIKQNEEKLANYQSVGEYLYKEYFQKFKENSKEFTNVRNKKESYERCIAQSFLKDELKLIFKKQREFGFSFSKKFEEEVLSVAFYKRALKDFSHLVGNCSFFTDEKRAPKNSPLAFMFVALTRIINLLNNLKNTEGILYTKDDLNTLLNEVLKNGTLTYKQTKKLLGLSDDYEFKGEKGTYFIEFKKYKEFIKALGEHNLSQDDLNEIAKDITLIKDEIKLKKALAKYDLNQNQIDSLSKLEFKDHLNISFKALKLITPLMLEGKKYDEACNELNLKVAINEDKKDFLPAFNETYYKDEVTNPVVLRAIKEYRKVLNALLKKYGKVHKINIELAREVGKNYSQRAKIEKEQNENYKAKKDAELECEKLGLKINSKNILKLRLFKEQKEFCAYSGEKIKISDLQDEKMLEIDHIYPYSRSFDDSYMNKVLVFTKQNQEKLNKTPFEAFGNDSTKWQKIEVLAKNLPEKKQKRILDKNYKDKEQKDFKDRNLNDTRYIARLVLNYTKDYLDFLPLSDDENTKLNDTQKGLKVHVEAKSGMLTSALRHTWGFSAKDRNNHLHHAIDAVIIAYANNSIVKAFSDFKKEQESNSAELYAKKISELDYKNKRKFFEPFSGFRQKVLDKIDEIFVSKPERKKPSGALHEETFRKEEEFYQSYGGKEGVLKALELGKIRKVNGKIVKNGDMFRVDIFKHKKTNKFYAVPIYTMDFALKVLPNKAVARSKKGEIKDWILMDENYEFCFSLYKDSLILIQTKDMQEPEFVYYNAFTSSTVSLIVSKHDNKFETLSKNQKILFKNANEKEVIAKSIGIQNLKVFEKYIVSALGEVTKAEFRQREDFKK

SEQ ID NO: 354 - protein, 984 aa, Campylobacter jejuni
MARILAFDIGISSIGWAFSENDELKDCGVRIFTKAENPKTGESLALPRRLARSARKRLARRKARLNHLKHLIANEFKLNYEDYQSFDESLAKAYKGSLISPYELRFRALNELLSKQDFARVILHIAKRRGYDDIKNSDDKEKGAILKAIKQNEEKLANYQSVGEYLYKEYFQKFKENSKEFTNVRNKKESYERCIAQSFLKDELKLIFKKQREFGFSFSKKFEEEVLSVAFYKRALKDFSHLVGNCSFFTDEKRAPKNSPLAFMFVALTRIINLLNNLKNTEGILYTKDDLNALLNEVLKNGTLTYKQTKKLLGLSDDYEFKGEKGTYFIEFKKYKEFIKALGDHSLSQDDLNEIAKDITLIKDEIKLKKALAKYDLNQNQIDSLSKLEFKDHLNISFKALKLITPLMLEGKKYDEACNELNLKVAINEDKKDFLPAFNETYYKDEVTNPVVLRAIKEYRKVLNALLKKYGKVHKINIELAREVGKNYSQRAKIEKEQNENYKAKKDAELECEKLGLKINSKNILKLRLFKEQKEFCAYSGEKIKISDLQDEKMLEIDHIYPYSRSFDDSYMNKVLVFTKQNQEKLNQTPFEAFGNDSAKWQKIEVLAKNLPTKKQKRILDKNYKDKEQKNFKDRNLNDTRYIARLVLNYTKDYLDFLPLSDDENTKLNDTQKGSKVHVEAKSGMLTSALRHTWGFSAKDRNNHLHHTIDAVIIAYANNSIVKAFSDFKKEQESNSAELYAKKISELDYKNKRKFFEPFSGFRQKVLDKIDEIFVSKPERKKPSGALHEETFRKEEEFYQSYGGKEGVLKALELGKIRKVNGKIVKNGDMFRVDIFKHKKTNKFYAVPIYTMDFALKVLPNKAVARSKKGEIKDWILMDENYEFCFSLYKDSLILIQTKDMQEPEFVYYNAFTSSTVSLIVSKHDNKFETLSKNQKILFKNANEKEVIAKSIGIQNLKVFEKYIVSALGEVTKAEFRQREDFKK

SEQ ID NO: 355 - protein, 984 aa, Campylobacter jejuni
MARILAFDIGISSIGWAFSENDELKDCGVRIFTKAENPKTGESLALPRRLARSARKRLARRKARLNHLKHLIANEFKLNYEDYQSFDESLAKAYKGSLISPYELRFRALNELLSKQDFARVILHIAKRRGYDDIKNSDDKEKGAILKAIKQNEEKLANYQSVGEYLYKEYFQKFKENSKEFTNVRNKKESYERCIAQSFLKDELKLIFKKQREFGFSFSKKFEEEVLSVAFYKRALKDFSHLVGNCSFFTDEKRAPKNSPLAFMFVALTRIINLLNNLKNTEGILYTKDDLNTFLNEVLKNGTLTYKQTKKLLGLSDDYEFKGEKGTYFIEFKKYKEFIKALGDHNLSQDDLNEIAKDITLIKDEIKLKKALAKYDLNQNQIDSLSKLEFKDHLNISFKALKLITPLMLEGKKYDEACNELNLKVAINEDKKDFLPAFNETYYKDEVTNPVVLRAIKEYRKVLNALLKKYGKVHKINIELAREVGKNHSQRAKIEKEQNENYKAKKDAELECEKLGLKINSKNILKLRLFKEQKEFCAYSGEKIKISDLQDEKMLEIDHIYPYSRSFDDSYMNKVLVFTKQNQEKLNKTPFEAFGNDSAKWQKIEVLAKNLPTKKQKRILDKNYKDKEQKDFKDRNLNDTRYIARLVLNYTKDYLDFLPLSDDENTKLNDTQKGSKVHVEAKSGMLTSALRHTWGFSTKDRNNHLHHAIDAVIIAYANNSIVKAFSDFKKEQESNSAELYAKKISELDYKNKRKFFEPFSGFRQKVLDKIDEIFVSKPERKKPSGALHEETFRKEEEFYQSYGGKEGVLKALELGKIRKVNGKIVKNGDMFRVDIFKHKKTNKFYAVPIYTMDFALKVLPNKAVARSKKGEIKDWILMDENYEFCFSLYKDSLILIQTKDMQEPEFVYYNAFTSSTVSLIVSKHDNKFETLSKNQKILFKNANEKEVIAKSIGIQNLKVFEKYIVSALGEVTKAEFRQREDFKK

SEQ ID NO: 356 - protein, 987 aa, Campylobacter jejuni
MARILAFDIGISSIGWAFSENDELKDCGVRIFTKAENPKTGESLALPRRLARSARKRLARRKARLNHLKHLIANEFKLNYEDYQSFDESLAKAYKGSLISPYELRFRALNELLSKQDFARVILHIAKRRGYDDIKNSDDKEKGAILKAIKQNEEKLANYQSVGEYLYKEYFQKFKENSKEFTNVRNKKESYERCIAQSFLKDELKLIFKKQREFGFSFSKKFEEEVLSVAFYKRALKDFSHLVGNCSFFTDEKRAPKNSPLAFMFVALTRIINLLNNLKNTEGILYTKDDLNTLLNEVLKNGTLTYKQTKKLLGLSDDYEFKGEKGTYFIEFKKYKEFIKSLGDHSLSQDDLNEIAKDITLIKDEIKLKKALAKYDLNQNQIDSLSKLEFKDHLNISFKALKLITPLMLEGKKYDEACNELNLKVAINEDKKDFLPAFNETYYKDEVTNPVVLRAIKEYRKVLNALLKKYGKVHKINIELAREVGKNHSQRAKIEKEQNENYKAKKDAELECEKLGLKINSKNILKLRLFKEQKEFCAYSGEKIKISDLQDEKMLEIDHIYPYSRSFDDSYMNKVLVFTKQNQEKLNQTPFEAFGNDSAKWQKIEVLAKNLPTKKQKRILDKNYKDKEQKNFKDRNLNDTRYIARLVLNYTKDYLDFLPLSDDENTKLNDTQKGSKVHVEAKSGMLTSALRHTWGFSAKDRNNHLHHAIDAVIIAYANNSIVKAFSDFKKEQESNSAELYAKKISELDYKNKRKFFEPFSGFRQKVLDKIDEIFVSKPERKKPSGALHEETFRKEEEFYQSYGGKEGVLKALELGKIRKVNGKIVKNGDMFRVDIFKHKKTNKFYAVPIYTMDFALKVLPNKAVARSKKGEIKDWILMDENYEFCFSLYKDSLILIQTKDMQEPEFVYYNAFTSSTVSLIVSKHDNKFETLSKNQKILFKNANEKEVIAKSIGIQNLKVFEKYIVSALGEVTKAEFRQREDFKNELR

SEQ ID NO: 357 - protein, 987 aa, Campylobacter jejuni
MARILAFDIGISSIGWAFSENDELKDCGVRIFTKAENPKTGESLALPRRLARSARKRLARRKARLNHLKHLIANEFKLNYEDYQSFDESLAKAYKGSLISPYELRFRALNELLSKQDFARVILHIAKRRGYDDIKNSDDKEKGAILKAIKQNEEKLANYQSVGEYLYKEYFQKFKENSKEFTNVRNKKESYERCIAQSFLKDELKLIFKKQREFGFSFSKKFEEEVLSVAFYKRALKDFSHLVGNCSFFTDEKRAPKNSPLAFMFVALTRIINLLNNLKNTEGILYTKDDLNALLNEVLKNGTLTYKQTKKLLGLSDDYEFKGEKGTYFIEFKKYKEFIKALGDHSLSQDDLNEIAKDITLIKDEIKLKKALVKYDLNQNQIDSLSKLEFKDHLNISFKALKLITPLMLEGKKYDEACNELNLKVAINEDKKDFLPAFNETYYKDEVTNPVVLRAIKEYRKVLNALLKKYGKVHKINIELAREVGKNYSQRAKIEKEQNENYKAKKDAELECEKLGLKINSKNILKLRLFKEQKEFCAYSGEKIKISDLQDEKMLEIDHIYPYSRSFDDSYMNKVLVFTKQNQEKLNQTPFEAFGNDSAKWQKIEVLAKNLPTKKQKRILDKNYKDKEQKDFKDRNLNDTRYIARLVLNYTKDYLDFLPLSDDENTKLNDTQKGSKVHVEAKSGMLTSALRHTWGFSAKDRNNHLHHAIDAVIIAYANNSIVKAFSDFKKEQESNSAELYAKKISELDYKNKRKFFEPFSGFRQKVLDKIDEIFVSKPERKKPSGALHEETFRKEEEFYQSYGGKEGVLKALELGKIRKVNGKIVKNGDMFRVDIFKHKKTNKFYAVPIYTMDFALKVLPNKAVARSKKGEIKDWILMDENYEFCFSLYKDSLILIQTKDMQEPELVYFNAFTSSTVSLIVSKHDNKFETLSKNQKILFKNANEKEVIAKSIGIQNLKVFEKYIVSALGEVTKAEFRQREDFKNELR

SEQ ID NO: 358 - protein, 983 aa, Campylobacter jejuni; identical to SEQ ID NO: 236

SEQ ID NO: 359 - protein, 987 aa, Campylobacter jejuni
MARILAFDIGISSIGWAFSENDELKDCGVRIFTKAENPKTGESLALPRRLARSARKRLARRKARLNHLKHLIANEFKLNYEDYQSFDESLAKAYKGSLISPYELRFRALNELLSKQDFARVILHIAKRRGYDDIKNSDDKEKGAILKAIKQNEEKLVNYQSVGEYLYKEYFQKFKENSKEFTNVRNKKESYERCIAQSFLKDELKLIFKKQREFGFSFSKKFEEEVLSVAFYKRALKDFSHLVGNCSFFTDEKRAPKNSPLAFMFVALTRIINLLNNLKNTEGILYTKDDLNALLNEVLKNGTLTYKQTKKLLGLSDDYEFKGEKGTYFIEFKKYKEFIKALGDHSLSQDDLNEIAKDITLIKDEIKLKKALAKYDLNQNQIDSLSKLEFKDHLNISFKALKLITPLMLEGKKYDEACNELNLKVAINEDKKDFLPAFNETYYKDEVTNPVVLRAIKEYRKVLNALLKKYGKVHKINIELAREVGKNYSQRAKIEKEQNENYKAKKDAELECEKLGLKINSKNILKLRLFKEQKEFCAYSGEKIKISDLQDEKMLEIDHIYPYSRSFDDSYMNKVLVFTKQNQEKLNQTPFEAFGNDSAKWQKIEVLAKNLPTKKQKRILDKNYKDKEQKDFKDRNLNDTRYIARLVLNYTKDYLDFLPLSDDENTKLNDTQKGSKVHVEAKSGMLTSALRHTWGFSAKDRNNHLHHAIDAVIIAYANNSIVKAFSDFKKEQESNSAELYAKKISELDYKNKRKFFEPFSGFRQKVLDKIDEIFVSKPERKKPSGALHEETFRKEEEFYQSYGGKEGVLKALELGKIRKVNGKIVKNGDMFRVDIFKHKKTNKFYAVPIYTMDFALKVLPNKAVARSEKGEIKDWILMDENYEFCFSLYKDSLILIQTKDMQEPELVYFNAFTSSTVSLIVSKHDNKFETLSKNQKILFKNANEKEVIAKSIGIQNLKVFEKYIVSALGEVTKAEFRQREDFKNELR

SEQ ID NO: 360 - protein, 987 aa, Campylobacter jejuni
MARILAFDIGISSIGWAFSENDELKDCGVRIFTKAENPKTGESLALPRRLARSARKRLARRKARLNHLKHLIANEFKLNYEDYQSFDESLAKAYKGSLISPYELRFRALNELLSKQDFARVILHIAKRRGYDNIKNSDNEEKSEILKAIKQNEEKLVNYQSVGEYLYKEYFQKFKENSKEFINVRNKKESYERCIAQSFLKDELKLIFQKQREFGLSFSKKFEEEVLSVAFYKRALKDFSHLVGNCSFFTDEKRAPKNSPLAFMFVALTRIINLLNNLKNTEGILYTKDDLNTLLNEVLKNGTLTYKQTKKLLGLSDDYEFKGEKGTYFIEFKKYKEFIKALGDHSLSQDDLNEIAKDITLIKDEIKLKKALAKYDLNQNQIDSLSKLEFKDHLNISFKALKLITPLMLEGKKYDEACNELNLKVVINEDKKDFLPAFNETYYKDEVTNPVVLRAIKEYRKVLNALLKKYGKVHKINIELAREVGKNHSQRAKIEKEQNENYKAKKDAELECEKLGLKINNKNILKLRLFKEQKEFCAYSGEKIKLSDLQDEKMLEIDHIYPYSRSFDDSYMNKVLVFTKQNQEKLNKTPFEAFGNDSTKWQKIEVLAKNLPTKKQKRILDKNYKDKEQKDFKDRNLNDTRYIARLVLNYTKDYLDFLPLSDDENTKLNDIQKGSKVHVEAKSGMLTSALRHTWGFSTKDRNNHLHHAIDAVIIAYANNSIVKAFSDFKKEQESNSAELYAKKISELDYKNKRKFFEPFSGFRQKVLDKIDEIFVSKPERKKPSGALHEETFRKEEEFYQSYGGKEGVLKALELGKIRKVNGKIVKNGDMFRVDIFKHKKTNKFYAVPIYTMDFALKVLPNKAVVQGKDKKSGLIKDWILMDENYEFCFSLYKDSLILIQTKDMQEPEFVYYNAFTSSTVSLIVSKHDNKFETLSKNQKILFKNANEKEVIAKSIGIQNLKVFEKYIVSALGEVTKAEFRQREDFKK

SEQ ID NO: 361 - protein, 984 aa, Campylobacter jejuni
MARILAFDIGISSIGWAFSENDELKDCGVRIFTKAENPKTGESLALPRRLARSARKRLARRKARLNHLKHLIANEFKLNYEDYQSFDESLAKAYKGSLISPYELRFRALNELLSKQDFARVILHIVKRRGYDDIKNSDDKEKGAILKAIKQNEEKLANYQSVGEYLYKEYFQKFKENSKEFTNVRNKKESYERCIAQSFLKDELKLIFKKQREFGFSFSKKFEEEVLSVAFYKRALKDFSHLVGNCSFFTDEKRAPKNSPLAFMFVALTRIINLLNNLKNTEGILYTKDDLNTLLNEVLKNGTLTYKQTKKLLGLSDDYEFKGEKGTYFIEFKKYKEFIKALGDHSLSQDDLNEIAKDITLIKDEIKLKKALAKYDLNQNQIDSLSKLEFKDHLNISFKALKLITPLMLEGKKYDEACNELNLKVAINEDKKDFLPAFNETYYKDEVTNPVVLRAIKEYRKVLNALLKKYGKVHKINIELAREVGKNHSQRAKIEKEQNENYKAKKDAEFECEKLGLKINSKNILKLRLFKEQKEFCAYSGEKIKISDLQDEKMLEIDHIYPYSRSFDDSYMNKVLVFTKQNQEKLNKTPFEAFGNDSAKWQKIEVLAKNLPTKKQKRILDKNYKDKEQKDFKDRNLNDTRYIARLVLNYTKDYLDFLPLSDDENTKLNDTQKGSKVHVEAKSGMLTSALRHTWGFSTKDRNNHLHHAIDAVIIAYANNSIVKAFSDFKKEQESNSAELYAKKISELDYKNKRKFFEPFSGFRQKVLDKIDEIFVSKPERKKPSGALHEETFRKEEEFYQSYGGKEGVLKALELGKIRKVNGKIVKNGDMFRVDIFKHKKTNKFYAVPIYTMDFALKVLPNKAVARSKKGEIKDWILMDENYEFCFSLYKDSLILIQTKDMQEPEFVYYNAFTSSTVSLIVSKHDNKFETLSKNQKILFKNANEKEVIAKSIGIQNLKVFEKYIVSALGEVTKAEFRQREDFKK

SEQ ID NO: 362 - protein, 984 aa, Campylobacter jejuni
MARILAFDIGISSIGWAFSENDELKDCGVRIFTKAENPKTGESLALPRRLARSARKRLARRKARLNHLKHLIANEFKLNYEDYQSFDESLAKAYKGSLISPYELRFRALNELLSKQDFARVILHIVKRRGYDDIKNSDDKEKGTILKAIKQNEEKLANYQSVGEYLYKEYFQKFKENSKEFTNVRNKKESYERCIAQSFLKDELKLIFKKQREFGFSFSKKFEEEVLSVAFYKRALKDFSHLVGNCSFFTDEKRAPKNSPLAFMFVALTRIINLLNNLKNTEGILYTKDDLNTLLNEVLKNGTLTYKQTKKLLGLSDDYEFKGEKGTYFIEFKKYKEFIKALGEHNLSQDDLNEIAKDITLIKDEIKLKKALAKYDLNQNQIDSLSKLEFKDHLNISFKALKLITPLMLEGKKYDEACNELNLKVAINEDKKDFLPAFNETYYKDEVTNPVVLRAIKEYRKVLNALLKKYGKVHKINIELAREVGKNYSQRAKIEKEQNENYKAKKDAELECEKLGLKINSKNILKLRLFKEQKEFCAYSGEKIKISDLQDEKMLEIDHIYPYSRSFDDSYMNKVLVFTKQNQEKLNQTPFEAFGNDSAKWQKIEVLAKNLPTKKQKRILDKNYKDKEQKDFKDRNLNDTRYIARLVLNYTKDYLDFLPLSDDENTKLNDTQKGSKVHVEAKSGMLTSALRHTWGFSAKDRNNHLHHAIDAVIIAYANNSIVKAFSDFKKEQESNSAELYAKKISELDYKNKRKFFEPFSGFRQKVLDKIDEIFVSKPERKKPSGALHEETFRKEEEFYQSYGGKEGVLKALELGKIRKVNGKIVKNGDMFRVDIFKHKKTNKFYAVPIYTMDFALKVLPNKAVARSKKGEIKDWILMDENYEFCFSLYKDSLILIQTKDMQEPEFVYYNAFTSSTVSLIVSKHDNKFETLSKNQKILFKNANEKEVIAKSIGIQNLKVFEKYIVSALGEVTKAEFRQREDFKK

SEQ ID NO: 363 - protein, 987 aa, Campylobacter jejuni
MARILAFDIGISSIGWAFSENDELKDCGVRIFTKAENPKTGESLALPRRLARSARKRLARRKARLNHLKHLIANEFKLNYEDYQSFNESLAKAYKGSLISPYELRFRALNELLSKQDFARVILHIAKRRGYDDIKNSDDKEKGAILKVIKQNEEKLANYQSVGEYLYKEYFQKFKENSKEFTNVRNKKESYERCIAQSFLKDELKLIFQKQREFGFSFSKKFEEEVLSVAFYKRALKDFSHLVGNCSFFTDEKRAPKNSPLAFMFVALTRIINLLNNLKNTEGILYTKDDLNALLNEVLKNGTLTYKQTKKLLGLSDDYEFKGEKGTYFIEFKKYKEFIKALGDHSLSQDDLNEIAKDITLIKDEIKLKKALAKYDLNQNQIDSLSKLEFKDHLNISFKALKLITPLMLEGKKYDEACNELNLKVAINEDKKDFLPAFNETYYKDEVTNPVVLRAIKEYRKVLNALLKKYGKVHKINIELAREVGKNYSQRAKIEKEQNENYKAKKDAELECEKLGLKINSKNILKLRLFKEQKEFCAYSGEKIKISDLQDEKMLEIDHIYPYSRSFDDSYMNKVLVFTKQNQEKLNQTPFEAFGNDSAKWQKIEVLAKNLPTKKQKRILDKNYKDKEQKDFKDRNLNDTRYIARLVLNYTKDYLDFLPLSDDENTKLNDTQKGSKVHVEAKSGMLTSALRHTWGFSAKDRNNHLHHAIDAVIIAYANNSIVKAFSDFKKEQESNSAELYAKKISELDYKNKRKFFEPFSGFRQKVLDKIDEIFVSKPERKKPSGALHEETFRKEEEFYQSYGGKEGVLKALELGKIRKVNGKIVKNGDMFRVDIFKHKKTNKFYAVPIYTMDFALKVLPNKAVARSKKGEIKDWILMDENYEFCFSLYKDSLILIQTKDMQEPELVYFNAFTSSTVSLIVSKHDNKFETLSKNQKILFKNANEKEVIAKSIGIQNLKVFEKYIVSALGEVTKAEFRQREDFKNELR

SEQ ID NO: 364 - protein, 984 aa, Campylobacter jejuni
MARILAFDIGISSIGWAFSENDELKDCGVRIFTKAENPKTGESLALPRRLARSARKRLARRKARLNRLKHLIANEFKLNYEDYQSFDESLAKAYKGSLISPYELRFRALNELLSKQDFARVILHIAKRRGYDDIKNSDDKEKGAILKAIKQNEEKLANYQSVGEYLYKEYFQKFKENSKEFTNVRNKKESYERCIAQSFLKDELKLIFKKQREFGFSFSKKFEEEVLSVAFYKRALKDFSHLVGNCSFFTDEKRAPKNSPLAFMFVALTRIINLLNNLKNTEGILYTKDDLNALLNEVLKNGTLTYKQTKKLLGLSDDYEFKGEKGTYFIEFKKYKEFIKALGDHSLNQDDLNEIAKDITLIKDEIKLKKALAKYDLNQNQIDSLSKLEFKDHLNISFKALKLITPLMLEGKKYDEACNELNLKVAINEDKKDFLPAFNETYYKDEVTNPVVLRAIKEYRKVLNALLKKYGKVHKINIELAREVGKNYSQRAKIEKEQNENYKAKKDAELECEKLGLKINSKNILKLRLFKEQKEFCVYSGEKIKISDLQDEKMLEIDHIYPYSRSFDDSYMNKVLVFTKQNQEKLNQTPFEAFGNDSAKWQKIEVLAKNLPTKKQKRILDKNYKDKEQKDFKDRNLNDTRYIARLVLNYTKDYLDFLPLSDDENTKLNDTQKGSKVYVEAKSGMLTSALRHTWGFSTKDRNNHLHHAIDAVIIAYANNSIVKAFSDFKKEQESNSAELYAKKISELDYKNKRKFFEPFSGFRQKVLDKIDEIFVSKPERKKPSGALHEETFRKEEEFYQSYGGKEGVLKALELGKIRKVNGKIVKNGDMFRVDIFKHKKTNKFYAVPIYTMDFALKVLPNKAVARSKKGEIKDWILMDENYEFCFSLYKDSLILIQTKDMQEPEFVYYNAFTSSTVSLIVSKHDNKFETLSKNQKILFKNANEKEVIAKSIGIQNLKVFEKYIVSALGEVTKAEFRQREDFKK

SEQ ID NO: 365 - protein, 984 aa, Campylobacter jejuni
MARILAFDIGISSIGWAFSENDELKDCGVRIFTKVENPKTGESLALPRRLARSARKRLARRKARLNHLKHLIANEFKLNYEDYQSFDESLAKAYKGSLISPYELRFRALNELLSKQDFARVILHIAKRRGYDDIKNSDDKEKGAILKAIKQNEEKLANYQSVGEYLYKEYFQKFKENSKEFTNVRNKKESYERCIAQSFLKDELKLIFKKQREFGFSFLKKFEEEVLSVAFYKRALKDFSHLVGNCSFFTDEKRAPKNSPLAFMFVALTRIINLLNNLKNTEGILYTKDDLNALLNEVLKNGTLTYKQTKKLLGLSDDYEFKGEKGTYFIEFKKYKEFIKALGEHNLSQDDLNEIAKDITLIKDEIKLKKALAKYDLNQNQIDSLSKLEFKDHLNISFKALKLITPLMLEGKKYDEAYNELNLKVAINEDKKDFLPAFNETYYKDEVTNPVVLRAIKEYRKVLNALLKKYGKVHKINIELAREVGKNHSQRAKIEKEQNENYKAKKDAELECEKLGLKINSKNILKLRLFKEQKEFCAYSGEKIKISDLQDEKMLEIDHIYPYSRSFDDSYMNKVLVFTKQNQEKLNQTPFEAFGNDSAKWQKIEVLAKNLPTKKQKRILDKNYKDKEQKDFKDRNLNDTRYIARLVLNYTKDYLDFLPLSDDENTKLNDTQKGSKVHVEAKSGMLTSALRHTWGFSAKDRNNHLHHAIDAVIIAYANNSIVKAFSDFKKEQESNSAELYAKKISELDYKNKRKFFEPFSGFRQKVLDKIDEIFVSKPERKKPSGALHEETFRKEEEFYQSYGGKEGVLKALELGKIRKVNGKIVKNGDMFRVDIFKHKKTNKFYAVPIYTMDFALKVLPNKAVARSKKGEIKDWILMDENYEFCFSLYKDSLILIQTKDMQEPELVYFNAFTSSTVSLIVSKHDNKFETLSKNQKILFKNANEKEVIAKSIGIQNLKVFEKYIVSALGEVTKAEFRQREDFKK

SEQ ID NO: 366 - protein, 984 aa, Campylobacter jejuni
MARILAFDIGISSIGWAFSENDELKDCGVRIFTKVENPKTGESLALPRRLARSARKRLARRKARLNHLKHLIANEFKLNYEDYQSFDESLAKAYKGSLISPYELRFRALNELLSKQDFARVILHIAKRRGYDDIKNSDDKEKGAILKAIKQNEEKLANYQSVGEYLYKEYFQKFKENSKEFTNVRNKKESYERCIAQSFLKDELKLIFKKQREFGFSFSKKFEEEVLSVAFYKRALKDFSHLVGNCSFFTDEKRAPKNSPLAFMFVALTRIINLLNNLKNTEGILYTKDDLNALLNEVLKNGTLTYKQTKKLLGLSDDYEFKGEKGTYFIEFKKYKEFIKALGEHNLSQDDLNEIAKDITLIKDEIKLKKALAKYDLNQNQIDSLSKLEFKDHLNISFKALKLITPLMLEGKKYDEACNELNLKVAINEDKKDFLPAFNETYYKDEVTNPVVLRAIKEYRKVLNALLKKYGKVHKINIELAREVGKNHSQRAKIEKEQNENYKAKKDAELECEKLGLKINSKNILKLRLFKEQKEFCAYSGEKIKISDLQDEKMLEIDHIYPYSRSFDDSYMNKVLVFTKQNQEKLNKTPFEAFGNDSAKWQKIEVLAKNLPTKKQKRILDKNYKDKEQKDFKDRNLNDTRYIARLVLNYTKDYLDFLPLSNDENTKLNDTQKGSKVHVEAKSGMLTSALRHTWGFSTKDRNNHLHHAIDAVIIAYANNSIVKAFSDFKKEQESNSAELYAKKISELDYKNKRKFFEPFSGFRQKVLDKIDEIFVSKPERKKPSGALHEETFRKEEEFYQSYGGKEGVLKALELGKIRKVNGKIVKNGDMFRVDIFKHKKTNKFYAVPIYTMDFALKVLPNKAVARSKKGEIKDWILMDENYEFCFSLYKDSLILIQTKDMQEPEFVYYNAFTSSTVSLIVSKHDNKFETLSKNQKILFKNANEKEVIAKSIGIQNLKVFEKYIVSALGEVTKAEFRQREDFKK

SEQ ID NO: 367 - protein, 984 aa, Campylobacter jejuni
MARILAFDIGISSIGWAFSENDELKDCGVRIFTKVENPKTGESLALPRRLARSARKRLARRKARLNHLKHLIANEFKLNYEDYQSFDESLAKAYKGSLISPYELRFRALNELLSKQDFARVILHIAKRRGYDDIKNSDDKEKGAILKAIKQNEEKLANYQSVGEYLYKEYFQKFKENSKEFTNVRNKKESYERCIAQSFLKDELKLIFKKQREFGFSFSKKFEEEVLSVAFYKRALKDFSHLVGNCSFFTDEKRAPKNSPLAFMFVALTRIINLLNNLKNTEGILYTKDDLNALLNEVLKNGTLTYKQTKKLLGLSDDYEFKGEKGTYFIEFKKYKEFIKALGEHNLSQDDLNEIAKDITLIKDEIKLKKALAKYDLNQNQIDSLSKLEFKDHLNISFKALKLITPLMLEGKKYDEACNELNLKVAINEDKKDFLPAFNETYYKDEVTNPVVLRAIKEYRKVLNALLKKYGKVHKINIELAREVGKNHSQRAKIEKEQNENYKAKKDAELECEKLGLKINSKNILKLRLFKEQKEFCAYSGEKIKISDLQDEKMLEIDHIYPYSRSFDDSYMNKVLVFTKQNQEKLNKTPFEAFGNDSAKWQKIEVLAKNLPTKKQKRILDKNYKDKEQKDFKDRNLNDTRYIARLVLNYTKDYLDFLPLSDDENTKLNDTQKGSKVHVEAKSGMLTSALRHTWGFSTKDRNNHLHHAIDAVIIAYANNSIVKAFSDFKKEQESNSAELYAKKISELDYKNKRKFFEPFSGFRQKVLDKIDEIFVSKPERKKPSGALHEETFRKEEEFYQSYGGKEGVLKALELGKIRKVNGKIVKNGDMFRVDIFKHKKTNKFYAVPIYTMDFALKVLPNKAVARSKKGEIKDWILMDENYEFCFSLYKDSLILIQTKDMQEPEFVYYNAFTSSTVSLIVSKHDNKFETLSKNQKILFKNANEKEVIAKSIGIQNLKVFEKYIVSALGEVTKAEFRQREDFKK

SEQ ID NO: 368 - protein, 984 aa, Campylobacter jejuni
MARILAFDIGISSIGWAFSENDELKDCGVRIFTKVENPKTGESLALPRRLARSARKRLARRKARLNHLKHLIANEFKLNYEDYQSFDESLAKAYKGSLISPYELRFRALNELLSKQDFARVILHIAKRRGYDDIKNSDDKEKGAILKAIKQNEEKLANYQSVGEYLYKEYFQKFKENSKEFTNVRNKKESYERCIAQSFLKDELKLIFKKQREFGFSFSKKFEEEVLSVAFYKRALKDFSHLVGNCSFFTDEKRAPKNSPLAFMFVTLTRIINLLNNLKNTEGILYTKDDLNALLNEVLKNGTLTYKQTKKLLGLSDDYEFKGEKGTYFIEFKKYKEFIKALGEHNLSQDDLNEIAKDITLIKDEIKLKKALAKYDLNQNQIDSLSKLEFKDHLNISFKALKLITPLMLEGKKYDEACNELNLKVAINEDKKDFLPAFNETYYKDEVTNPVVLRAIKEYRKVLNALLKKYGKVHKINIELAREVGKNHSQRAKIEKEQNENYKAKKDAELECEKLGLKINSKNILKLRLFKEQKEFCAYSGEKIKISDLQDEKMLEIDHIYPYSRSFDDSYMNKVLVFTKQNQEKLNKTPFEAFGNDSAKWQKIEVLAKNLPTKKQKRILDKNYKDKEQKDFKDRNLNDTRYIARLVLNYTKDYLDFLPLSDDENTKLNDTQKGSKVHVEAKSGMLTSALRHTWGFSTKDRNNHLHHAIDAVIIAYANNSIVKAFSDFKKEQESNSAELYAKKISELDYKNKRKFFEPFSGFRQKVLDKIDEIFVSKPERKKPSGALHEETFRKEEEFYQSYGGKEGVLKALELGKIRKVNGKIVKNGDMFRVDIFKHKKTNKFYAVPIYTMDFALKVLPNKAVARSKKGEIKDWILMDENYEFCFSLYKDSLILIQTKDMQEPEFVYYNAFTSSTVSLIVSKHDNKFETLSKNQKILFKNANEKEVIAKSIGIQNLKVFEKYIVSALGEVTKAEFRQREDFKK

SEQ ID NO: 369 - protein, 984 aa, Campylobacter jejuni
MARILAFDIGISSIGWAFSENDELKDCGVRIFTKVENPKTGESLALPRRLARSARKRLARRKARLNHLKHLIANEFKLNYEDYQSFDESLAKAYKGSLISPYELRFRALNELLSKQDFARVILHIAKRRGYDDIKNSDDKEKGAILKAIKQNEEKLANYQSVGEYLYKEYFQKFKENSKEFTNVRNKKESYERCIAQSFLKDELKLIFKKQREFGFSFSKKFEEEVLSVAFYKRALKDFSHLVGNCSFFTDEKRAPKNSPLAFMFVALTRIINLLNNLKNTEGILYTKDDLNALLNEVLKNGTLTYKQTKKLLGLSDDYEFKGEKGTYFIEFKKYKEFIKALGEHNLSQDDLNEIAKDITLIKDEIKLKKALAKYDLNQNQIDSLSKLEFKDHLNISFKALKLITPLMLEGKKYDEACNELNLKVAINEDKKDFLPAFNETYYKDEVTNPVVLRAIKEYRKVLNALLKKYGKVHKINIELAREVGKNHSQRAKIEKEQNENYKAKKDAELECEKLGLKINSKNILKLRLFKEQKEFCAYSGEKIKISDLQDEKMLEIDHIYPYSRSFDDSYMNKVLVFTKQNQEKLNKTPFEAFGNDSAKWQKIEVLAKNLPTKKQKRILDKNYKDKEQKDFKDRNLNDTRYIARLVLNYTKDYLDFLPLSDDENTKLNDTQKGSKVHVEAKSGMLTSALRHTWGFSTKDRNNHLHHAIDAVIIAYANNSIVKAFSDFKKEQESNSAELYAKKISELDYKNKRKFFEPFSGFRQKVLDKIDEIFVSKPERKKPSGALHEETFRKEEEFYQSYGGKEGVLKALELGKIRKVNGKIVKNGDMFRVDIFKHKKTNKFYAVPIYTMDFALKVLPNKAVARSKKGEIKDWILMDENYEFCFSLYKDSLILIQTKDMQEPEFVYYNAFTSSTVSLIVSKHDNKFETLSKNQKILFKNANEKEVIAKSIGIQNLKVFEKYIVSALGEVTKAEFIQREDFKK

SEQ ID NO: 370 - protein, 987 aa, Campylobacter jejuni
MARILAFDIGISSIGWAFSENDELKDCGVRIFTKVENPKTGESLALPRRLARSARKRLARRKARLNHLKHLIANEFKLNYEDYQSFDESLAKAYKGSLISPYELRFRALNELLSKQDFARVILHIAKRRGYDDIKNSDDKEKGAILKAIKQNEEKLANYQSVGEYLYKEYFQKFKENSKEFTNVRNKKESYERCIAQSFLKDELKLIFKKQREFGFSFSKKFEEEVLSVAFYKRALKDFSHLVGNCSFFTDEKRVPKNSPLAFMFVALTRIINLLNNLKNTEGILYTKDDLNALLNEVLKNGTLTYKQTKKLLGLSDDYEFKGEKGTYFIEFKKYKEFIKALGEHNLSQDDLNEIAKDITLIKDEIKLKKALAKYDLNQNQIDSLSKLEFKDHLNISFKALKLITPLMLEGKKYDEACNELNLKVAINEDKKDFLPAFNETYYKDEVTNPVVLRAIKEYRKVLNALLKKYGKVHKINIELAREVGKNHSQRAKIEKEQNENYKAKKDAELECEKLGLKINSKNILKLRLFKEQKEFCAYSGEKIKISDLQDEKMLEIDHIYPYSRSFDDSYMNKVLVFTKQNQEKLNQTPFEAFGNDSAKWQKIEVLAKNLPTKKQKRILDKNYKDKEQKNFKDRNLNDTRYIARLVLNYTKDYLDFLPLSDDENTKLNDTQKGSKVHVEAKSGMLTSALRHTWGFSAKDRNNHLHHAIDAVIIAYANNSIVKAFSDFKKEQESNSAELYAKKISELDYKNKRKFFEPFSGFRQKVLDKIDEIFVSKPERKKPSGALHEETFRKEEEFYQSYGGKEGVLKALELGKIRKVNGKIVKNGDMFRVDIFKHKKTNKFYGVPIYTMDFALKVLPNKAVARSKKGEIKDWILMDENYEFCFSLYKDSLILIQTKDMQEPEFVYYNAFTSSTVSLIVSKHDNKFETLSKNQKILFKNANEKEVIAKSIGIQNLKVFEKYIVSALGEVTKAEFRQREDFKNELR

SEQ ID NO: 371 - protein, 984 aa, Campylobacter jejuni
MARILAFDIGISSIGWAFSENDELKDCGVRIFTKVENPKTGESLALPRRLARSARKRLARRKVRLNHLKHLIANEFKLNYEDYQSFDESLAKAYKGSLISPYELRFRALNELLSKQDFARVILHIAKRRGYDDIKNSDDKEKGAILKAIKQNEEKLANYQSVGEYLYKEYFQKFKENSKEFTNVRNKKESYERCIAQSFLKDELKLIFKKQREFGFSFSKKFEEEVLSVAFYKRALKDFSHLVGNCSFFTDEKRAPKNSPLAFMFVALTRIINLLNNLKNTEGILYTKDDLNALLNEVLKNGTLTYKQTKKLLGLSDDYEFKGEKGTYFIEFKKYKEFIKALGEHNLSQDDLNEIAKDITLIKDEIKLKKALAKYDLNQNQIDSLSKLEFKDHLNISFKALKLITPLMLEGKKYDEACNELNLKVAINEDKKDFLPAFNETYYKDEVTNPVVLRAIKEYRKVLNALLKKYGKVHKINIELAREVGKNHSQRAKIEKEQNENYKAKKDAELECEKLGLKINSKNILKLRLFKEQKEFCAYSGEKIKISDLQDEKMLEIDHIYPYSRSFDDSYMNKVLVFTKQNQEKLNKTPFEAFGNDSAKWQKIEVLAKNLPTKKQKRILDKNYKDKEQKDFKDRNLNDTRYIARLVLNYTKDYLDFLPLSDDENTKLNDTQKGSKVHVEAKSGMLTSALRHTWGFSTKDRNNHLHHAIDAVIIAYANNSIVKAFSDFKKEQESNSAELYAKKISELDYKNKRKFFEPFSGFRQKVLDKIDEIFVSKPERKKPSGALHEETFRKEEEFYQSYGGKEGVLKALELGKIRKVNGKIVKNGDMFRVDIFKHKKTNKFYAVPIYTMDFALKVLPNKAVARSKKGEIKDWILMDENYEFCFSLYKDSLILIQTKDMQEPEFVYYNAFTSSTVSLIVSKHDNKFETLSKNQKILFKNANEKEVIAKSIGIQNLKVFEKYIVSALGEVTKAEFRQREDFKK

SEQ ID NO: 372 - protein, 721 aa, Campylobacter jejuni
MFVALTRIINLLNNLKNTEGILYTKDDLNTLLNEVLKNGTLTYKQTKKLLGLSDDYEFKGEKGTYFIEFKKYKEFIKALGDHSLSQDDLNEIAKDITLIKDEIKLKKALAKYDLNQNQIDSLSKLEFKDHLNISFKALKLITPLMLEGKKYDEACNELNLKVAINEDKKDFLPAFNETYYKDEVTNPVVLRAIKEYRKVLNALLKKYGKVHKINIELAREVGKNYSQRAKIEKEQNENYKAKKDAELECEKLGLKINSKNILKLRLFKEQKEFCAYSGEKIKISDLQDEKMLEIDHIYPYSRSFDDSYMNKVLVFTKQNQEKLNQTPFEAFGNDSAKWQKIEVLAKNLPTKKQKRILDKNYKDKEQKDFKDRNLNDTRYIARLVLNYTKDYLDFLPLSDDENTKLNNTQKGSKVYVEAKSGMLTSALRHTWGFSTKDRNNHLHHAIDAVIIAYANNSIVKAFSDFKKEQESNSAELYAKKISELDYKNKRKFFEPFSGFRQKVLDKIDEIFVSKPERKKPSGALHEETFRKEEEFYQSYGGKEGVLKALELGKIRKVNGKIVKNGDMFRVDIFKHKKTNKFYAVPIYTMDFALKVLPNKAVARSKKGEIKDWILMDENYEFCFSLYKDSLILIQTKDMQEPEFVYYNAFTSSTVSLIVSKHDNKFETLSKNQKILFKNANEKEVIAKSIGIQNLKVFEKYIVSALGEVTKAEFRQREDFKK

SEQ ID NO: 373 - protein, 512 aa, Campylobacter jejuni
MHKINIELAREVGKNHSQRAKIEKEQNENYKAKKDAEIECEKLGLKINSKNILKLRLFKEQKEFCAYSGEKIKLSDLQDEKMLEIDHIYPYSRSFDDSYMNKVLVFTKQNQEKLNKTPFEAFGNDSTKWQKIEVLAKNLPEKKQKRILDKNYKDKEQKDFKDRNLNDTRYIARLVLNYTKDYLDFLPLSDDENTKLNDTQKGSKVHVEAKSGMLTSALRHTWGFSAKDRNNHLHHAIDAAIIAYANNSIVKAFSDFKKEQESNSVELYAKKISELDYKNKRKFFEPFSGFRQKVLDKIDEIFVSKPERKKPSGALHEETFRKEEEFYQSYGGKEGVLKALELGKIRKVNGKIVKNGDMFRVDIFKHKKTNKFYAVPIYTMDFALKVLPNKAVARSKKGEIKDWILMDENYEFCFSLYKDSLILIQTKDMQEPELVYFNAFTSSTVSLIVSKHDNKFETLSKNQKILFKNANEKEVIAKSIGIQNLKVFEKYIVSALGEVTKAEFRQREDFKK

SEQ ID NO: 374 - protein, 965 aa, Campylobacter jejuni
MKIIGFNLGIANIGWALRENDEIIDCGVRVFDIPENPKNGNSLALERRENKARMKIVKRKKARMLATKTFLKKELNVDLSKLFLIGSTQSIYELRAKALSSLISKEELSAIILHIAKHRGYDDSALKNENGTIIEALNKNKETMLKFKSVGEYFYKNFVQNKEVKKIRNTTEDYSNSVPRSLLKQELDLILDKQKELGLIKNADFKEKLFEIIFFKRPLKDFSNKIGNCIFFENEKRAAKNTISACEFVALGKVVNLLKSIEKDIGIVYEKDSINEIMSIILDKTSISYKKIRDILNLPQEINFKGLDYSKNNVENSKLVDLKKLNEFKKALGDGFANLDKDILDSIATDITLTKDTATLKEKLKNYNVLNAEQIEKLSELVFNDHINLSLKALKQIIPLMYEGKRYDEACELCNFTIAKNQEKSEYLPLFEKTRFAKDISSPVVIRAICEFRKLLNDIIRRYGSVHKIHLELTRDFGISFSDRKKIIKEIEQNEQSRIKALETIKELKLEETSKNIQIVRLFEDQKGICPYSGLKMDLNRLDELVIDYIRPYNRSLDDSYSNKVLTFKKLSDLKQGKTPFEAFGEDEKLWAEINERIKEYNGKKRFKIFDKFFKDKKPFDFTEQTLQDTRWLTKLVASYLNEYLSFLPISEDENTALGYGEKGSKQHVILSSGMITQMLRNFWYLGFKNHKDYKNNAMDAIIVAFTTNSIIFAFNNFKKELDLAKAEFYANKISESDYLLKRKFLPPFSGFKEQALEKVKNIFVSHSLKIKNKGTLHDLTPLKIKELKNTYGDLDLAVKLGKIRKYNDKYYANANGSLVRADLFVDKKNKFHAVSIYKADFSTKKLPNKTPATTSNGETKEGIEMNENYNFCMSLYKNTPISVKIKGMKEPIICYYHGFNTSGSKITYKKHDNNYHNLSEDEMVVFRKNDKESIAVGKILEIKKYSISPSGELSLIENEERKWF

SEQ ID NO: 375 - protein, 759 aa, Campylobacter jejuni
MLSVAFYKRALKDFSHLVGNCSFFTDEKRAPKNSPLAFMFVALTRIINLLNNLKNTEGILYTKDDLNALLNEVLKNGTLTYKQTKKLLGLSDDYEFKGEKGTYFIEFKKYKEFIKALGEHNLSQDDLNEIAKDITLIKDEIKLKKALAKYDLNQNQIDSLSKLEFKDHLNISFKALKLITPLMLEGKKYDEACNELNLKVAINEDKKDFLPAFNETYYKDEVTNPVVLRAIKEYRKVLNALLKKYGKVHKINIELAREVGKNHSQRAKIEKEQNENYKAKKDAELECEKLGLKINSKNILKLRLFKEQKEFCAYSGEKIKISDLQDEKMLEIDHIYPYSRSFDDSYMNKVLVFTKQNQEKLNKTPFEAFGNDSAKWQKIEVLAKNLPTKKQKRILDKNYKDKEQKDFKDRNLNDTRYIARLVLNYTKDYLDFLPLSDDENTKLNDTQKGSKVHVEAKSGMLTSALRHTWGFSTKDRNNHLHHAIDAVIIAYANNSIVKAFSDFKKEQESNSAELYAKKISELDYKNKRKFFESFSGFRQKVLDKIDEIFVSKPERKKPSGALHEETFRKEEEFYQSYGGKEGVLKALELGKIRKVNGKIVKNGDMFRVDIFKHKKTNKFYAVPIYTMDFALKVLPNKAVARSKKGEIKDWILMDENYEFCFSLYKDSLILIQTKDMQEPEFVYYNAFTSSTVSLIVSKHDNKFETLSKNQKILFKNANEKEVIAKSIGIQNLKVFEKYIVSALGEVTKAEFRQREDFKK

SEQ ID NO: 376 - protein, 984 aa, Campylobacter jejuni
MVRILAFDIGISSIGWAFSENDELKDCGVRIFTKVENPKTGESLALPRRLARSARKRLARRKARLNHLKHLIANEFKLNYEDYQSFDESLAKAYKGSLISPYELRFRALNELLSKQDFARVILHIAKRRGYDDIKNSDDKEKGAILKAIKQNEEKLANYQSVGEYLYKEYFQKFKENSKEFTNVRNKKESYERCIAQSFLKDELKLIFKKQREFGFSFSKKFEEEVLSVAFYKRALKDFSHLVGNCSFFTDEKRAPKNSPLAFMFVALTRIINLLNNLKNTEGILYTKDDLNALLNEVLKNGTLTYKQTKKLLGLSDDYEFKGEKGTYFIEFKKYKEFIKALGEHNLSQDDLNEIAKDITLIKDEIKLKKALAKYDLNQNQIDSLSKLEFKDHLNISFKALKLITPLMLEGKKYDEACNELNLKVAINEDKKDFLPAFNETYYKDEVTNPVVLRAIKEYRKVLNALLKKYGKVHKINIELAREVGKNHSQRAKIEKEQNENYKAKKDAELECEKLGLKINSKNILKLRLFKEQKEFCAYSGEKIKISDLQDEKMLEIDHIYPYSRSFDDSYMNKVLVFTKQNQEKLNKTPFEAFGNDSAKWQKIEVLAKNLPTKKQKRILDKNYKDKEQKDFKDRNLNDTRYIARLVLNYTKDYLDFLPLSDDENTKLNDTQKGSKVHVEAKSGMLTSALRHTWGFSTKDRNNHLHHAIDAVIIAYANNSIVKAFSDFKKEQESNSAELYAKKISELDYKNKRKFFEPFSGFRQKVLDKIDEIFVSKPERKKPSGALHEETFRKEEEFYQSYGGKEGVLKALELGKIRKVNGKIVKNGDMFRVDIFKHKKTNKFYAVPIYTMDFALKVLPNKAVARSKKGEIKDWILMDENYEFCFSLYKDSLILIQTKDMQEPEFVYYNAFTSSTVSLIVSKHDNKFETLSKNQKILFKNANEKEVIAKSIGIQNLKVFEKYIVSALGEVTKAEFRQREDFKK

SEQ ID NO: 377 - protein, 1003 aa, Campylobacter lari]
MRILGFDIGINSIGWAFVENDELKDCGVRIFTKAENPKNKESLALPRRNARSSRRRLKRRKARLIAIKRILAKELKLNYKDYVAADGELPKAYEGSLASVYELRYKALTQNLETKDLARVILHIAKHRGYMNKNEKKSNDAKKGKILSALKNNALKLENYQSVGEYFYKEFFQKYKKNTKNFIKIRNTKDNYNNCVLSSDLEKELKLILEKQKEFGYNYSEDFINEILKVAFFQRPLKDFSHLVGACTFFEEEKRACKNSYSAWEFVALTKIINEIKSLEKISGEIVPTQTINEVLNLILDKGSITYKKFRSCINLHESISFKSLKYDKENAENAKLIDFRKLVEFKKALGVHSLSRQELDQISTHITLIKDNVKLKTVLEKYNLSNEQINNLLEIEFNDYINLSFKALGMILPLMREGKRYDEACEIANLKPKTVDEKKDFLPAFCDSIFAHELSNPVVNRAISEYRKVLNALLKKYGKVHKIHLELARDVGLSKKAREKIEKEQKENQAVNAWALKECENIGLKASAKNILKLKLWKEQKEICIYSGNKISIEHLKDEKALEVDHIYPYSRSFDDSFINKVLVFTKENQEKLNKTPFEAFGKNIEKWSKIQTLAQNLPYKKKNKILDENFKDKQQEDFISRNLNDTRYIATLIAKYTKEYLNFLLLSENENANLKSGEKGSKIHVQTISGMLTSVLRHTWGFDKKDRNNHLHHALDAIIVAYSTNSIIKAFSDFRKNQELLKARFYAKELTSDNYKHQVKFFEPFKSFREKILSKIDEIFVSKPPRKRARRALHKDTFHSENKIIDKCSYNSKEGLQIALSCGRVRKIGTKYVENDTIVRVDIFKKQNKFYAIPIYAMDFALGILPNKIVITGKDKNNNPKQWQTIDESYEFCFSLYKNDLILLQKKNMQEPEFAYYNDFSISTSSICVEKHDNKFENLTSNQKLLFSNAKEGSVKVESLGIQNLKVFEKYIITPLGDKIKADFQPRENISLKTSKKYGLR

SEQ ID NO: 378 - protein, 372 aa, candidate division
DNESAINQIAYILTTQKADEGIRAELDSLPLSDKAKKAIVKIKPTNFKAFGHLSIKALQKITPHILEGMTYDKACEAAGYDFKKQSASLEQITNPVVKRAITQTLKVVRAIERKYGKPYFIKVETARDLAKNFKDRNAIKKENEENQGYNEDIKSIITNGYEASPKTKGGKQLLNHLKEFNVRLNKNADFNGQQIIKVKLYREQQGKCLYSGNPIDFETMLRDDNAYQVDHIVPFSRSNNDGITNKVLVFTEENQKKADRTPFEYFGTDERRWEKFVALVETTYKTRDVKTSDKATNAINYEYNGYAMKKKQNLLLQDYKNDSWNVRALNDTRYITRFIQNYLRQNVDFAEGEEKQRIIAPNGTTTAYLRKR

SEQ ID NO: 379 - protein, 1117 aa, Capnocytophaga ochracea
MKHILGLDLGSNSIGWAFVQQDFENKQGKIIATGSRIIPMDQGILGDFERGNTVSQTAERTTYRSMRRLRERHLLRRERLHRVLHLLGFLPPHYDAQIDFTKRYGKFIDNAEPKIAYNNGNFIFMNSFNEMVEDFKKHQPQLFYKKSNGEESRIPYDWTIYYLRKKALSQKITQQELAWLILHFNQKRGYYQLRGEEETENPNKEVAFHSLKVVDVEAEAPNKKGEIWYTIRLENGWIYRRTSKNPLDDWKGKTRDFIVTTDLNDDGTIKLDKEGKEKRSFRAPDENDWNLLKKKTEHDIDFSGKPVGTYIYDHLLQNPNQKIKGKLVRTIERKYYKDELKAILAKQIALQPELFTETLLADCIRELYRKNETQQQNLLSKDFLHLFVEDIIFYQRPLCSKKSTIANCTLEKRSYIDKETNERKDAPIKVCAKSNPYYQEFRVLQWLQNLRIYEIETDREVTAEFIETPQDYEALFNFLMSQKEIDNEGLLKYFLFAKNPQIKDKAAKSELKKWLTTYRWNYVYDAADNSSKKYPMNETGYELQRYLQKVEGLPANFLTFDITYQLWHLLYSVKDKVEFEKALKKFAKKKQLDKTSFVDSFKNFKPYPNEYGSFSEKAIKKLLPLMRFGNHWDFNRIDVSTQKRIDDLINGVANEDIRTIIREKAEKYQLNSETCFQDLPLWLAQYVVYNRHAEATDIEKWTSVSDLEAYLEDFKQHSLRNPIVEQVVTETLRVVRDIWQQYSGGQANFFDEIHIELGRELKKTAEERKQLSDKNQENENTNLRIKKLLAELKEDASIQNVRPYSLVQQELLKIYEEGVFSSTDEIEEDIQKIRKKVEPTPPEIQRYKLWLEQKYKSPYTGEVISLTKLFTEEYEIEHIIPQSRYYDDSLSNKVICESAVNKLKTNQLGLEFIQNHHGEKVRITANKEVTIFTEEQYKEFVKKHYANNSAKQQKLLLNEIPEKMVARQLNDTRYISKCISEILSKIVRSDEKDEGVNSKNIIPCTGKITTALKQDWGLNDVWNELILPRFERMNQLTQTQLFTSYNDRLQKNLPTVPIEYSQGFQKKRIDHRHHAMDALVIACATREHINYMNNQHALDKSKDKKEKQQSRIDLHPL

SEQ ID NO: 380 - protein, 303 aa, Capnocytophaga ochracea
MSFKQNLRVINKATNYYEKWEEKNGVLVKKKVKQEGTNWAIRKPLHKETVSGKIVLDRKIGKDKILTATRKAVDITFTEKIISSITDTGIQKILLNYLKYKGSPEVAFSAEGLEELNKNIAQYNDGKKHQPIYKVRIFEEGSKFPLGETGAKATKYVEAAKGTNLFFGVYQGKEKRTYATIPLNEVIERQKQGLPSVPERNEKGEPLLFSLSPNDLVYVPMEGEIAETIDFNNLSKEQKERIYKTVSFTGNQCFFVQEAVASPIVNKMEYSPLNKMERDILGIMIKEVCVKLKVDRLGNIIKA

SEQ ID NO: 381 - protein, 1471 aa, Capnocytophaga sp.
MCKYFYIKNFITFVLSKSIIPMKHILGLDLGSNSIGWAFVQQDFENKQGKIIATGSRIIPMDQGILGDFERGNTVSQTAERTTYRSTRRLRERHLLRRERLHRVLHILGFLPPHYDAQIDFTKRYGKFIDNAEPKIAYNNGNFIFMNSFNEMIEDFKKHQPQLFYKKSNGEESKIPYDWTIYYLRKKALSQKITQQELAWLILHFNQKRGYYQLRGEEETENPNKEVAFHSLKVVDVEAEAPNKKGEIWYTIRLENGWIYRRTSKIPLDDWKGKTRDFIVTTDLNDDGTIKVDKEGKEKRSFRAPDENDWNLLKKKTEHDIDFSGKTVGAYIYDHLLQNPNQKIKGKLVRTIERKYYKDELKAILAKQIALQPELFTETLLADCIRELYRKNETQQQNLLSKDFLHLFVEDIIFYQRPLRSKKSTIANCTLEKRSYIDKETNERKDAPIKVCAKSNPYYQEFRVLQWLQNLRIYEIETDREVTAEFIETPQDCEALFNFLMSQKEIDNKGLLKYFLFAKNPQIKDKAAKSELKKWLTTYRWNYVYDAADNSSKKYPMNETGYELQRYLQKVEGLPANFLTFDITYQLWHLLYSVKDKVEFEKALKKFAKKKQLDKTSFVDSFKNFKPYPNEYGSFSEKAIKKLLPLMRFGNHWDFNRIDVSTQKRIDDLINGVANEDIRTIIREKAEKYQLNSETCFQDLPLWLAQYVVYNRHAEATDIEKWTSVSDLEAYLEDFKQHSLRNPIVEQVVTETLRVVRDIWQQYGGGQANFFDEIHIELGRELKKTAEERKQLSDKNQENESTNLRIKKLLAELKEDASIQNVRPYSLVQQELLKIYEEGVFSATDEVEEDIQKIRKKAEPSKADLQRYKLWLEQKYKSPYTGEVISLTKLFTEEYEIEHIIPQSRYYDDSLSNKVICESAVNKLKTNQLGLEFIQNHHGEKVRITANKEVTIFTEEQYKEFVKKHYANNSAKQQKLLLNEIPEKMVARQLNDTRYISKYISEILSKIVRSDEKDEGVNSKNIIPCTGKITTALKQDWGLNDVWNKLILPRFERMNQLTQTQLFTSYNDRLQKNLPTVPIEYSQGFQKKRIDHRHHAMDALVIACATREHINYMNNQHALDKSKDKKEKQQSRIDLRTILCEKKNNNWQFKKPWSTFTQEAKEALEHIVVSFKQNLRVINKATNYYEKWEEKNGVLVKKKVKQEGTNWAIRKPLHKETVSGKIVLDRKIGKDKILTATRKAVDITFTEKIISSITDTGIQKILLNYLKYKGSPEVAFSTEGLEELNKNIAQYNNGKKHQPIYKVRIFEEGSKFPLGETGAKATKYVEAAKGTNLFFGVYQGKGKRTYATIPLNEVIERQKQGLPSVPERNEKGEPLLFSLSPNDLVYVPMEGEIAETIDFNNLSKEQKERIYKTVSFTGNQCFFVQEAVATPIVNKMEYSPLNKMERDILGTMIKEVCIKLKVDRLGNITKA

SEQ ID NO: 382 - protein, 1450 aa, Capnocytophaga sp.
MKHILGLDLGSNSIGWAFVQQDFENKQGKIIATGSRIIPMDQGILGDFERGNTVSQTAERTTYRNTRRLRERHLLRRERLHRVLHILGFLPPHYDSQIDFTKRYGKFIDNAEPKIAYNNGNFIFMNSFNEMIEDFKKYQPQLFYKKSNGEESKIPYDWTIYYLRKKALSQKITQQELAWLILHFNQKRGYYQLRGEEETENPNKEVAFHSLEVVDVEAEAPNKKGEIWYTIRLENGWIYRRTSKIPLDDWKGKTRDFIVTTDLNDDGTIKLDKEGKEKRSFRAPDENDWNLLKKKTEHDIDFSGKTVGAYIYDHLLQNPNQKIKGKLVRTIERKYYKDELKAILAKQIALQPELFTETLLADCIRELYRKNETQQQNLLSKDFLHLFVEDIIFYQRPLRSKKSTIANCTLEKRSYIDKETNERKDTPIKVCAKSNPYYQEFRVLQWLQNLRIYEIETDREVTAEFIETAQDNEALFNFLMSQKEIDNESLLKYFLFAKNPQIKDKVAKSELKKWLTTYRWNYVYDAADNSSKKYPMNETGYELQQYLQKVEGLPANFLTFDITYRLWHLLYSVKDKVEFEKALKKFAQEYQLDEASFVDSFKNFKPYPNEYGSFSEKAIKKLLPLMRFGNHWDFNRIDVSTQKRIDDLINGVANDEIRTIIREKAEKYQLNSETCFQGLPLWLAQYVVYNRHAEAADIEKWTSVNDLEAYLEDFKQHSLRNPIVEQVITETLRVVRDIWQRYGGGQANFFDEIHIELGRELKKTAEERKQLSNRNQENENTNLRIKKLLAELKEDASIQNVRPYSPVQQELLKIYEEGVFSATDEVEEDIQKIRKKAEPTTPEIQRYKLWLEQKYKSPYTGEVISLTKLFTEEYEIEHIIPQSRYYDDSLSNKVICESAVNKLKTNQLGLEFIQNHHGEKVRITANKEVTIFTEEQYKEFVKKHYANNSAKQQKLLLNEIPEKMVARQLNDTRYISKYISEILSKIVRSDEKDEGVNSKNIIPCTGKITTALKQDWGLNDVWNELILPRFERMNQLTQTQLFTSYNDRFQKNLPTVPIEYSQGFQKKRIDHRHHAMDALVIACATREHINYMNNQHALDKSKDKKEKQQSRIDLRTILCEKKNNNWQFKKPWSTFTQEAQEALEHIVVSFKQNLRVINKATNYYEKWEEKNGVLVKKKVKQEGTNWAIRKPLHKETVSGKIVLDRKIGKDKILTATRKSVDITFTEKIISSITDTGIQKILLNYLKYKGSPEVAFSAEGLEELNKNIAQYNDGKKHQPIYKVRIFEEGSKFPLGETGAKATKYVEAAKGTNLFFGVYQGKGKRTYATIPLNEVIERQKQGLPSVPERNEKGEPLLFSLSPNDLVYVPMEGEIAETIDFNNLSKEQKERIYKTVSFTGNQCFFVQEAVATPIVNKIEYSPLNKMERDILGTMIKEVCIKLKVDRLGNITKA

SEQ ID NO: 383 - protein, 1435 aa, Capnocytophaga sp.
MKNILGLDLGTTSIGFAHIVEDENKEKSEIKELGVRIVSLATDEQSDFEKGKSISTNANRTLKHGARLNLDRYQQRRKFLIDLLQKANLITSASILAENGKNTTHSTWQLRAKAVTERIEKEEFARVLLAINKKRGYKNSRKTKTEDEGQAIDGMAIAKCLYDENLTPGQLSLQLLQQNKKLLPDFYRSDLQKEFDLVWNLQKQFYPDILTDSFYKELQGKGKDATSKAFSKRYHFDTAENKGSKESVRLQAYQWRAEAISKQLSKEEVAYVLTEINNNLNNSSGYLGAISDRSKELYFNRQTVGQYLYAQLQENRHNSLKNKVFYRQDYLDEFERIWETQASFHKELTDELKKQIRDVVIFYQRKLKSQKGLVSFCEFESKEIEIEKDGKAITKSIGARVVPKSSPLFQEFKIWQILNNVTCKRKGIRKKKSSAKSTELDLFNEPSQSIFSLDMECKQLLFDELNLKGDLKSDKVLKLLGYSPQEWEINYNQLEGNRTQKSLYEAYLKIIEIEGYEVKDILQIKSTKDDWSLDESPLSASEIRERVKVIFQTLGICTKILYFDPLLPVKEFEQQYSYQLWHLLYSYESDDSTSGNETLYRILEKKYAFKREHATILANVALQDDYGSLSTKAIRKIYPYIKENQYSTACELAGYKHSKLSLTTEELEARELKNIIPLLKKNALRNPVVEKILNQMINVVNALIEKNSERDAEGKITKYFHFDEIRIELARELKKNAQERYEMTQNINKAKLEHQKISEKLQKQFGIKNPTKSDIIRYRLYQELEHNGYKELYTNTYIAPDVLFSKNIDIEHIVPKARVFDDSFSNKTLAFKEFNIKKGESTAFDYITSLNCEGELNQYLTRVENAYKTKSISLTKYKNLLKKASEIGDGFINRDLRDTQYIAKKAKEILFQVTKNVLSTSGSITDRLREDWGLVDVMKELNMPKYQSLGLTEVEERKDGNKVTVIKDWTKRNDHRHHAMDALTVAFTKPSYIQYLNHLNARKDENNKNYSVILAIEKKETIKVPINNGKNKRVFIEPILNFRQVAKKHLEEIFISHKAKNKVVTKNINKPAGTDKQQITLTPRGQLHKETIYGKYQYYVNKEEKVGVKFDERTITKVSNPLYREALLKRLQANDNDPKKAFAGKNALSKNPIYLDEAKTKTLPEKVNLTYLEEDFSIRKDISPDNFKDLKSIEKVIDQGVKRILIKRLQAYDNDPKKAFVDLEKNPIWLNKEKGIAIKRVTISGVSNAQPLHIGKDHLGKTTLNKEGKEVPVDYVSTGNNHHVAIYRDKEGNLQEQIVSFFEAVVRAQQGLPIIDKNYKQAEGWQFMFTMKQNEMFVFPNEATGFNPAEIDLLDPKNKKLISPNLFRVQTISIVKYGNSVVRDFKFRHHLETTLQDDKILQGITFQQIKSLEPLRNIVKVRINHLGDIVNIGEY

SEQ ID NO: 384 - protein, 1432 aa, Capnocytophaga sp.
MKNILGLDLGTTSIGFAHIVEDENKEKSEIKELGVRIVSLTTDEQSDFEKGKSITTNANRTLKHGARLNLDRYQQRRKYLIDLLHKANLITPSSILAENGKNTTHSTWQLRAKAVTERIEKEEFARILLAINKKRGYKSSRKAKTEDEGQAIDGMAIAKRLYDENLTPGQLSLQLLQQNKKLLPDFYRSDLQKEFDLVWNFQKQFYPDILTDIFYKELQGKGKDATSKAFSKRYHFDTAENKGSKESVRLQAYQWRAEAVSKQLSKEEVAYVLTEINNNLNNASGYLGAISDRSKELYFNRQTVGQYLYAQLQENRHNSLKNKVFYRQDYLDEFERIWETQALFHKELTDELKKQIRDVVIFYQRKPKSQKGLISFCEFESKEIEIEKDGKTITKNIGARVVPKSSPLFQEFKIWQILNNVICKRKGIRKKKISAKTTQLDLLNESSQTIFSLDMECKQLLFDELNLKGDLKSDKVLKLLGYSPQEWEINYNQLEGNRTQKALYEAYLKIVEMEAHDVKDILQIKSTKDDWSLDESPLSASEIRESVKAIFQALGICTKILYFDPLLPVKDFEEQDSYQLWHLLYSYESDDSTSGNETLYRILEKKYAFKREHARILANVALQDDYGSLSTKAIRKIYPNIKENQYSTACEMAGYKHSKLSLTTEELEARELKNIIPLLKKNALRNPVVEKILNQMINVVNALIEKNSERDAEGKITKYFHFDEIRIELARELKKNAQKRYEMTQNINKAKSEHQKISEILQKEFGIKNPTKSDIIRYRLYKELEHNGYKELYTNTYIAPDVLFSKNIDIEHIVPKARVFDDSFSNKTLAFKDFNIKKGESTAFDYITSLKNEEKLNQYLARVENAYKTKNISPAKYKNLLKKASEIGDGFINRDLRDTQYIAKKAKEILFQVTKNVLSTSGSITDRLREDWSLVDVMKELNMPKYQSLGLTEVEERKDGNKVTVIKDWTKRNDHRHHAMDALTVAFTKPSYIQYLNHLNARKDENNKNYSVILAIEKKETIKVPTNNGKNKRVFIEPIPNFRQVAKKHLEEIFISHKAKNKVVTKNTNKPAGTNKQQITLTPRGQLHKETIYGKYQYYVNKEEKVGVKFDKETIAKVSNPLYREALLKRLQANDNDPKKAFTGKNALSKNPIYLDEAKTKTLPEKVNLTYLEEDFSVRKKIVPKNPTSKEFVPNLKSIEKVVDEGVRNILIERLRVYNNDPEKAFVDLEKNPIWLNKEKGIAIKRVTISGVNNAQPLHIGKDHLGKTTLNKEGKEIPVDYVSTGNNHHVAIYRDKEGNLQEQIVSFFEAVVRTQQGLPIIDKTYKQEEGWQFLFTMKQNEMFVFPNEATGFNPAEIDLLDPKNKKQISPNLFRVQKIATKDYFFRHHLETNVETDNVLKNTTWKREGLSGLKDIVKVRINHLGDIVSIGEY

SEQ ID NO: 385 - protein, 1426 aa, Capnocytophaga sp.
MKNILGLDLGTTSIGFTHIVEDENKEKSEIKELGVRIVSLTTDEQSDFEKGKSISTNANRTLKHGARLNLDRYQQRRKFLIDLLQKANLITSSSILAENGKNTTHSTWQLRAKAVTERIEKEEFARVLLAINKKRGYKSSRKAKTEDEGQAIDGMAIAKRLYDENLTPGQLSLQLLQQNKKLLPDFYRSDLQKEFDLVWNFQKQFYPDILTDSFYKELQGKGKDATSKAFSKRYHFDTAENKGSRESVRLQAYQWRAEAISKQLSKEEVAYVLTEINNNLNNASGYLGAISDRSKELYFNRQTVGQYLYAQLQENKHNSLKNKVFYRQDYLDEFERIWETQASFHKELTEELKKQIRDVVIFYQRKLKSQKGLISFCEFESKEIEIEKDGKTITKSIGARVVPKSSPLFQEFKIWQILNNVTCKRKGIRKKKSSAKSTELDLFNEPSQTIFSLDMECKQLLFEELNLKGDLKSDKVLKLLGYSPQEWEINYNQLEGNRTQKALYEAYLKIVEMEAHDVKDILQIKSTKDDWALEESPLSASEIRERVKAIFQTLGICTKILYFDPLLPVKEFEEQDSYQLWHLLYSYESDDSTSGNETLYRILEKKYAFKREHATILANVTLQDDYGSLSTKAIRKIYPYIKENQYSTACEKAGYKHSKLSLTTEELEARELKNIIPLLKKNALRNPVVEKILNQMINVVNALIEKNSERDAEGKITKYFHFDEIRIELARELKKNAQERYEMTQNINKAKLEHQKISGILQKEFGIKNPTKSDITRYRLYQELAHNGYNDLYTNTYIPKELLFSKNIDIEHIVSKARVFDDSFSNKTLAFREFNIKKGESTAFDYITSLNNEEELNQYLNRVENAYKTKNISPAKYKNLLKKASEIGDGFINRDLRDTQYIAKKAKEILFQVTKNVLSTSGSITDRLREDWGLVDVMKELNMPKYQSLGLTEVEERKEGNKVTVIKNWTKRNDHRHHAMDALTVAFTKPSYIQYLNHLNARKDKNNKNYSVILAIEEKETIKVPTNNGKNKRVFIEPIPNFRQVAKKHLEEIFISHKAKNKVVTKNTNKPAGTDKQQITLTPRGQLHKETVYGKYQYYVNKEEKIGVKFDKETIAKVSNPVYREALLKRLQANDNDPKKAFAGKNALSKNPIYLDEAKTKTLTEKVNLTYLEEDFSIRKDISPDNFKDLKSIEKVIDQGVKRILIKRLQDYDNDPKKAFVDLEKNPIWLNKEKGIAIKRVTISGVNNAQPLHIGKDHLGKTTLNKEGKEIPVDYVSTGNNHHVAIYRDKEGNLQEQIVSFFEAVVGAQQGLPIVDKTYKQAEGWQFLFTMKQNEMFVFPNEATGFNPAEIDLLDPKNKKQISPNLFRVQKIATKDYFFRHHLETNVDTDNVLKNTTWKREGLSGLKDIVKVRINHLGDIVSIGEY

SEQ ID NO: 386 - protein, 1450 aa, Capnocytophaga sp.
MKRILGLDLGSNSIGWAFVEQDFENKQGKIIATGSRIIPMDQGILGDFEKGNTVSQTAERTTYRSMRRLRERHLLRRERLHRVLHILGFLPPHYDAQIDFTKRYGKFIDNAEPKIAYNNGNFIFMNSFNEMIEDFKKYQPQLFYKKSNGEESKIPYDWTIYYLRKKVLSQKITQQELAWLILHFNQKRGYYQLRGEEETENPNKEVAFHSLKVVDVEAEAPNKKGEIWYTIRLENGWIYRRTSKIPLDDWKGKTRDFIVTTDLNDDGTIKVDKEGKEKRSFRAPDENDWNLLKKKTEHDIDFSGKTVGAYIYDHLLQNPNQKIKGKLVRTIERKYYKDELKAILAKQIALQPELFTETLLADCIRELYRKNETQQQNLLSKDFLHLFVEDIIFYQRPLRSKKSTIANCTLEKRSYIDKETNERKDTFIKVCAKSNPYYQEFRVLQWLQNLRIYEIETDREVTAEFIETAEDYEALFNFLMSQKEIDNEGLLKYFLFAKNPQIKDKVAKSELKKWLTTYRWNYVYDAADNSSKKYPMNETGYDLQRYLQKVEGLPANFLTFDITYRLWHLLYSVKDKVEFEKALKKFAQEYQLDEASFVDSFKNFKPYPNEYGSFSEKAIKKLLPLMRFGNHWDFNRIDVSTQKRIDDLINGVANDEIRTIIREKAEKYQLNSESCFQGLPLWLAQYVVYNRHAEATDIEKWTSVSDLETYLEDFKQHSLRNPIVEQVVTETLRVVRDIWQQYGGGQANFFDEIHIELGRELKKTAEERKQLSNRNQENENTNLRIKKLLAELKEDASIQNVRPYSPVQQELLKIYEEGVFSSTDQVEEDIQKIRKKAEPTTPEIQRYKLWLEQKYKSPYTGEVISLTKLFTEEYEIEHIIPQSRYYDDSLSNKVICESAVNKLKTNQLGLEFIQNHHGEKVRITGNKEVTIFTEEQYKEFVKKHYANNSAKQQKLLLNEIPEKMVARQLNDTRYISKYISEILSKIVRSDEKDEGVNSKNVIPCTGKITTALKQDWGLNDVWNELILPRFERMNQLTQTQLFTSYNDRFQKNLPTVPIEYSQGFQKKRIDHRHHAMDALVIACATREHINYMNNQHALDKNKDKKEKQQSRIDLRTILCEKKNNNWQFKKPWSTFTQETKEALEHIVVSFKQNLRVINKATNYYEKWEEKNGVLVKKKVKQEGTNWAIRKPLHKETVSGKIVLDRKIGKDKILTATRKEVDITFTEKIISSITDTGIQKILLNYLNYKGSPEVAFSAEGLEELNKNIAQYNDGKKHQPIYKVRIFEEGSKFPLGETGAKATKFVEAAKGTNLFFGVYQGKEKRSYATIPLNEVIERQKQGLPSVPERNEKGEPLLFSLSPNDLVYVPMEGEIAETIDFNNLSKEQKERIYKTVSFTGNQCFFVQEAVATPIVNKMEYSPLNKMERDILGTMIKEVCIKLKVDRLGNITKA

SEQ ID NO: 387 - protein, 1437 aa, Capnocytophaga sp.
MKYIKYILGLDIGSNSIGWALIQLDLLQKTKRIIATGSRIIPMDQKVLSDFGKGITISPTAQRTSYRNARHCRERHLLRRERLHRVLHILGFLPTHYDKQIDFSKRYGKFVDNTEPKIAYNERKFLFMDSFQEMLADFKIHQPDLFYTKKNGEESKIPYDWTIYYLRKKALSRKISKEELAWIILNFNQKRGYYQLREEEEENKENDFEIISSKIISVIKKDKDKKYNKYWYDIILENGLVYQAAFYNDFVYNWINQDREFIIERISLKNGTEKVKLSYLPTFDEIDKMDKKEQDKYYKKIKIKTENSIGNKTVGCYIYDHILQNPNEKIKGKLVRTIERKYYKEELKAILEKQVALQPELFTDQLFADCIRELYSKNEAQQRNLAARDFVHLFVEDIIFYQRSLRRQKSTLANCSLESRSYIDKDSHTRKEAPLKVCPKSNPYYQEFRVLQWLQNLKIYEIDTDQEVTHEFIKTLEDKQQFFDFLMNQKEIDCEELLKYFLNQTYPNAREKALKSELKKWKDTYRWNYVYDIGEKSSKKYPMNETRYELKRHLEKVANLPDDFLSSEVEYLLWHLIYSVKDKVAYEKGLKTFAQKHHLDKDSFVESFKKFKPYPSEYGSFSEKAIRKLLPLMRFGSYWDFNHIDKNTQKRIEDLITGVENEEIRTILREKAEKYQLEKETDFQDLPLWLAQYIVYNRHAEASSLEKWTSVNDLETYLNEFKQYSLRNPIVEQVVMETLRVVRDIWQQYGQGQASFFDEIHIELGRELKKTAKEREKLSKQNQKNEDINLSIKEKLKELEKYNTRAYSITHQEKYKLWLEQKHISPYTGQIISPENLFTDNYEIEHIIPQSRFFDDSLSNKVVCESIVNKAPYKDRQLGLEFIKNQGGRIVKELSTENKTIKIFTEEQYRTFIKEHYSNNPEKTKKLLLEEIPEKMVARQMNDTCYISKFISEILSKIVRSDEQDEGVHSKNVILCTGKITSALKQDWGVNDVWNDLILPRFERMNDLTQSTLFTTYNEKYQKYLPTVPMEYSNGFQKKRIDHRHHAMDAIIIACATREHINYINNQHALEKGKDKKEKQKEHDKLREKLCIKKDNKGSEENYSWIFKKPWDTFTQEVQAALEGIVVSFKQNLRVINKATNYYERWVEENGKYIKKMVKQEGTNWAIRKPLHEETISGKIYLDREEITKNDILTATRKTVDSSFDEKRIKKITDTGIQKILLNYLKYKGSPEIAFSPEGLEELNKNLSIYNDGKPHKPIYKVRIYEKGSGRFALGEKGRKYKKYVQGAPNLYFGIYQGANKRSFATIPLNEVIERQKQGRPSIPEYNEKGDPLLFSLSPNDLVYVPVEGEIIEDIDFQNLSKEQKERIYNVNDFSSTCYFTPNRIAKAIFPKEVDLQRKGDKLPGSYDTKTASLEGIQIKEVCIKLKIDRLGNISKA

SEQ ID NO: 388 - protein, 1140 aa, Catellicoccus marimammalium
MKNMTKVNVGLDVGISSAGWSVINAETNQILESGVRLFSGSDADENVNRRNQRQGRRLFRRRKLRIQEAKKYLENVFQLKDIEPKDEWNPYEIRVRALNEKVSKEELSIALLNIVKHRGISYELEDVTDEEGTNTQSFQSGLDYNRRLLKTKTVGEIQYDRLQKYGQVRGQIQTEDGLLINIFPTKNYVEEVERILETQKKYHPEIDDVFIEKIISFVTRKREYFVGPGNEKSRTDYGIYRENGETLDNLFEILIGKDKFYPEEYRAAGSSYTAQIFNLLNDLNNLRIPTTEDHHLTKAQKEEIITELKNTSRLSGGMLKLISKVTKAPKEEISGYRKDEKDKPDLHSLAYYRKQKNMLEKEGIQIADFSEELLDELATMMTLNTEPGEIRKQLNKITNQYDILTPEVIEVLVKNHTAFVATSNHKWHRFSLKLMKEFIPELLETSKEQSTILCERGFIQNRASYLDENHHFNYAELRENLYNPVVRKSTCEMLKVFTAIQEKYPNIQNVIVELPRETNEDEQKRKIKKINDNNAKRKKEILKEAQAQSGLSEEALEEKLLKTKGLYLKLMLWYEQEGKCVYSGQEIPLSDLLQNKGGYEVDHIIPISISFDDRLCNKVLVRQQLNSQKSNQTPFEYMTTHTDGHLSFHELKELVGKNKRFSKEKRELLLAEIYSNDIETRKRFINRNLVDTSYTARIVLNALQQYKKENQLSMNVSVVRGAMTNILRKKVKLDKTRETFHHHAIDASLMAVIPNIEFFKERKEWLPKSANEEVVEVEVSEEETMPEKEFKVKMRLPESFIQDVQILQRNSFAKEEVSGPQTRERNLKIKFSHQVDQKMNRKVADDTIYGTRQAQLGKDKKEETYVIGKIKDIYNYDEYVRFKKRYDKNKESFLMYHHDPQTFEKLEEILAQYPEYIEDEKGKKKKVSPFALYREENGPVTKYAKKNNGPVIKQLKYYDSKLNRKIDISHKYSTKNRQVVLQSLKPYRTDVYRNQDTGEYTLVGIDQNDGKFVNGHYGIPKSRYEEIKANNKLSEHDEFVFSLYKNSMVKVIDENGESIVVRYLSRSMPNRKNNAEIKPVEKYQFEDGEVVPVYGKCRKQMQTVFVKKGWTLLKGNTDILGNTYFVEKESENPKKMIDDK

SEQ ID NO: 389 - protein, 1419 aa, Chryseobacterium sp.
MMIKNILGLDLGTNSIGWALIKQNFENKYGEILGMGSRIIPMSQDVLGEFGKGNSVSQTAARTGYRGVRRLRERFLLRRERLHRVLNVLNFLPEHYASQIDFEKRFGKFKYETEPKLAYNNDGFFFKNSFDEMLGDFKDHQFHLLENGRKVPYDWTIYYLRKKALSQKIEKEELAWILLNFNQKRGYYQLRGEDFEEEKDRVFVRLKVDRVVDSGENIKGKILYDVYFENGWKYEKQIVKTEDWIGRTKEFIVTESILKNGDTKRTFKAVDSEKDWIAIKTKTEQEIDKSHKTVGAYIYEALLQNPKQKIKGKLVRTIERKFYREELKKILERQKEFHPELQSDDLYNDCIRELYRNNEAHQITLSKKDFVHLLLNDLIFYQRPLRSQKSSVSNCTLEFRKYKDENGVEHAQYLKTIPKSNPYYQEFRVWQWMFNLNIYRKDDDTNVTKEFLSSTEDYETLFEFLNNRKEVDQKALLRHFKLNEKTHRWNYVEDKKYPCNETKTMISTRLEKVENYPSDFLTREMEQNIWHIIYSVNDKIEYEKALKSFAHKNNLDENSFFEAFKKFPPFKSEYGSFSEKAIKKLLPLLRLGKYWNWESIDRKSQGRIEKIITGEFDGNIKDKVREKAIHLTAENDFQGLQLWLAQYIVYGRHSEASMIGKWNSADDLEEFLKGFKQHSLRNPIVEQVITETLRVVKDIWLKYGNGAKDFFSEIHIELGREMKQTKDERVDATKRITENENTNLRIKALLAEMMNDNSVENIRPYSPMQQEILKIYEDGILKSDIEIDDDILKISKTAQPSSSDLKRYKLWLEQRYKSPYTGQIIPLNKLFTSEYEIEHIIPQSRYFDDSFSNKIICESAVNKLKDNYIGLGFIKQFGGMIVECGFGKSVEIFKAEEYEDFVKKHYANNRSKRNKLLLEEIPEKMIDRQLNDTRHISKYISGVLSNIVRQEDGTDEGVNSKNIVPGNGKITTQLKQDWGLNDVWNELILPRFERMNQLTNSTDFTSWNKNHQKFLPTVPIEFSKGFSKKRIDHRHHAMDALVIACATKDHINLLNNQSAKSDTKRYDLKRKLMKFERVVYSHSKTGEKIEKEVPKQFLKPWDNFTVDAKNKMETIIVSFKQNLRVINKATNHYEKWIEKDGIKRKELIKQEGTNWAIRKPMHKETVSGKVDLPGIKIPKGKILTATRKSLDTSFDLKTINSITDTGIQKILKNYLEFKGSSELAFSPEGIEDMNKNIEKFNDGKPHQSINKVRIFELGSKFSVGQTGNKKDKYVEAAKGTNLFFAVYEDKNGKRSYETIPLNEVIERQKQGLDSVSFKNKEDFLLCPNDLVYVPSEDELENIYNIDFKNLTTEKTGNIYKVVSFSGNQIFFIRQDIAISIVNKAEFSTLNKMERAIDGSMIKENCIKLKIDRLGNIAKI

SEQ ID NO: 390 - protein, 1065 aa, Clostridium perfringens
MNKDINYALGLDIGITSVGWAVINLDLNRIEDLGVRIFNAAENPKDGSSLALPRRLARGRRRLLRRKAYRVERVRKLIVKNNILTKEELEGLFKNKEVIDVWEARVKGLDYKLSREEWAKILINFCKRRGFKSNRKNETKDKEAGQILSSISYNIEKMKETNSRTIGEYIYNEVKNSDDSYAPLRNKFGEYKMCVSRDVLREEIHTLFEKQRELGNNFASDEIEDKYFEIFNSQRPFSNFEDLEKLVGFCTFERKKHKRAPKHCISSEEFTLYEGINKLSIIKDGEKRKLSEEERTLVVNEAFNKKEIKYTTLRKLLGLSEDELFSTLTYSIDKDISKTENTKFVSLKGYHEIKRAIEKGVSKKAWQDIENNRNLLNDIAYVLTLGKTDDEIEKQLRLRNVPEELFESLLDMSFSKFNNLSIYALEKILPFMKEGYQYNEACEKAGYNFKAIYEGVRTKKLPVIEIDEIVNPVVNRALAQTRKVINSVIDKYGSPVRINIELARDLAKNFKDRKLIEKEQKENRANLDKIRENLRELMDKEPTAVEVLKYRLWEQQRGECAYTQSQIALERLFSPGYCEIDHIIPFSRSFDDSLSNKILVLGSENQRKGNKIPYEYFGEDSERWNSFEIWVKGSYLNYKKKANLLKKKFTEEEQRDWKARNLQDTKYICRYISNFVNNRLEFKESENKQKVITVNGRATAYLRSRWGLNKVREDGDKHHALDAAVVGVTTQGMVQKISKYSKAHELYTVRKNDEFVDVETGECVDVDEYKEIRKDILPRPWRGFSEELKLRLSDNPLEELKKLPIETYNEEFIKENVKPIFVSRVPFRKISGKLFKETIYSERAFKDGYFVSKKSLVDLKRGDLDNFYNYECDKKLYDAISERMKEFNYNGKKAFESPFRKPTKSGKEGPVVRSVKIKSAAPFKDGIPMNEGLVAKEGMVRIDIYEKEGKYFVVPVYRYQLAKGIVPKRAAIAGKSELKWPIMDQTYNFKFSIFKNDLIEIKYAKKDGYFGYYDGFDRHTASLVIENHDNSDRYRGIGVKTGVVEFNKYEVDVLGNYHKVNLGGN

SEQ ID NO: 391 - protein, 1099 aa, Corynebacterium accolens
MSLSYRVGIDVGTYSLGCTAIEVDDNDQPVNILSSVSLIHDSGLDPDQQKRAVTRLASSGVARRTRRLYRRRRRRMINLEKFLTSQGWETRPFEHYSDPYLPWNARVALVNGYISDDAQRGMYLSIAFRHIANHRGWRNPYWKVSSLYSPDKPSDAFEQIRKELEESTGHKIPETVTVGQLISFAQFGKDRLRGGGKKKDEKKPQEQVNQAVISARLHQIDHAREINEICRVQKIDDALRKQILDLVFAAESPKGAQIGRVGKDPLQPKLPRALKASDAFQQYRIVALAGNLRIYRDGVSTPLDRDEKLIVFNYLINLSHKEEPSWLKVAEVLNIDRGQLHGTATMTDDGERAGAAPPVHDTNRTILGCKIKPLVHWWEGANDDERAAMLKALSNSEVEDFDSPAGAQTQAFFANLDESEQEKLDSLHLPIGRAAYSEDTLMRLTSRMLDENLDLYEARLAEFDIPKDWAPPAPRIGEPVGNPAVDRVLKGVARWLEAAADEWGAPKSVVIEHVRDGFISKSKANEIDRANNARHKRNRELFKQMQENLGIDGKLRSSDLWRYQSVQRQNCQCAYCGSPITYTTCEMDHIVPRAGEGSTNTRDNLVATCHRCNLAKKNIPFAVWAAQTNIPGVSVKEALDRTRHWSEDSGMTSKDFKKFRKNVCDRLKRTVVDEPLDARSMESVAWMANELRGRVAQRFQEENTVVNVYRGELTAEARRAAGISDKLRFIDGTGKSRLDRRHHAVDAAVVAFTQNYVAETLAIRSNKKREAQLLQAAEQWKEFTGSDAEHRAAWNAWLPKMQKLAVLLQKALDEDRIAVTSNLRLRLGNGRAHEDSIGELKTIRVGDAISVTDIDRASSEALWCALTREPDFDENNGLPENPDRRIRIHGTWYDAEDDIEVFPVGAGAIKVRGGYAELSRFHHARIYKIPGKKAPVYCMLRVYNADLIRHRHEDLFSVEIKPQTMSVRQAEPKLRKALAENTAEYLGWLVTDDELVIDTSNFNTGQIAEMQSELGQVRRWRLDGFYSPSTLRLRPLQMSAEGLREDTSIGAKKIIDRPGWLPAINKLFGEGHVTVVRRDALGRARLTSNAHLPISWKAE

SEQ ID NO: 392 - protein, 1084 aa, Corynebacterium diphtheriae
MKYHVGIDVGTFSVGLAAIEVDDAGMPIKTLSLVSHIHDSGLDPDEIKSAVTRLASSGIARRTRRLYRRKRRRLQQLDKFIQRQGWPVIELEDYSDPLYPWKVRAELAASYIADEKERGEKLSVALRHIARHRGWRNPYAKVSSLYLPDGPSDAFKAIREEIKRASGQPVPETATVGQMVTLCELGTLKLRGEGGVLSARLQQSDHAREIQEICRMQEIGQELYRKIIDVVFAAESPKGSASSRVGKDPLQPGKNRALKASDAFQRYRIAALIGNLRVWVDGEKRILSVEEKNLVFDHLVNLTPKKEPEWVTIAEILGIDRGQLIGTATMTDDGERAGARPPTHDTNRSIVNSRIAPLVDWWKTASALEQHAMVKALSNAEVDDFDSPERAKVQAFFADLDDDVHAKLDSLHLPVGRAAYSEDTLVRLTRRMLSDGVDLYTARLQEFGIEPSWTPPTPRIGEPVGNPAVDRVLKTVSRWLESATKTWGAPERVIIEHVREGFVTEKRAREMDGDMRRRAARNAKLFQEMQEKLNVQGKPSRADLWRYQSVQRQNCQCAYCGSPITFSNSEMDHIVPRAGQGSTNTRENLVAVCHRCNQSKGNTPFAIWAKNTSIEGVSVKEAVERTRHWVTDTGMRSTDFKKFTKAVVERFQRATMDEEIDARSMESVAWMANELRSRVAQHFASHGTTVRVYRGSLTAEARRASGISGKLEFLDGVGKSRLDRRHHAIDAAVIAFTSDYVAETLAVRSNLKQSQAHRQEAPQWREFTGKDAEHRATWRVWCQKMEKLSALLTEDLRDDRVVVMSNVRLRLGNGSAHEETIGKLSKVKLGSQLSVSDIDKASSEALWCALTREPDFDPKDGLPANPERHIRVNGTHVYAGDNIGLFPVSAGSIALRGGYAELGSSFHHARVYKITSGKKPAFAMLRVYTIDLLPYRNQDLFSVELKPQTMSMRQAEKKLRDALATGNAEYLGWLVVDDELVVDTSKIATDQVKAVEAELGTIRRWRVDGFFGDTRLRLRPLQMSKEGIKKESAPELSKIIDRPGWLPAVNKLFSEGNVTVVRRDSLGRVRLESTAHLPVTWKVQ

SEQ ID NO: 393 - protein, 1084 aa, Corynebacterium diphtheriae
MKYHVGIDVGTFSVGLAAIEVDDAGMPIKTLSLVSHIHDSGLDPDEIKSAVTRLASSGIARRTRRLYRRKRRRLQQLDKFIQRQGWPVIELEDYSDPLYPWKVRAELAASYIADEKERGEKLSVALRHIARHRGWRNPYAKVSSLYLPDGPSDAFKAIREEIKRASGQPVPETATVGQMVTLCELGTLKLRGEGGVLSARLQQSDHAREIQEICRMQEIGQELYRKIIDVVFAAESPKGSASSRVGKDPLQPGKNRALKASDAFQRYRIAALIGNLRVRVDGEKRILSVEEKNLVFDHLVNLAPKKEPEWVTIAEILGIDRGQLIGTATMTDDGERAGARPPTHDTNRSIVNSRIAPLVDWWKTASALEQHAMVKALSNAEVDDFDSPEGAKVQAFFADLDDDVHAKLDSLHLPVGRAAYSEDTLVRLTRRMLADGVDLYTARLQEFGIEPSWTPPAPRIGEPVGNPAVDRVLKTVSRWLESATKTWGAPERVIIEHVREGFVTEKRAREMDGDMQRRAARNAKLFQEMQEKLNVQGKPSRADLWRYQSVQRQNCQCAYCGSPITFSNSEMDHIVPRAGQGSTNTRENLVAVCHRCNQSKGNTPFAIWAKNTSIEGVSVKEAVERTRHWVTDTGMRSPDFKKFTKAVVERFQRATMDEEIDARSMESVAWMANELRSRVAQHFASHGTTVRVYRGSLTAEARRASGISGKLKFFDGVGKSRLDRRHHAIDAAVIAFTSDYVAETLAVRSNLKQSQAHRQEAPQWREFTGKDAEHRAAWRVWCQKMEKLSALLTEDLRDDRVVVMSNVRLRLGNGSAHKETIGKLSKVKLGSQLSVSDIDKASSEALWCALTREPDFDPKEGLPANPERHIRVNGTHVYAGDNIGLFPVSAGSIALRGGYAELGSSFHHARVYKITSGKKPAFAMLRVYTIDLLPYRNQDLFSVELKPQTMSMRQAEKKLRDALATGNAEYLGWLVVDDELVVDTSKIATDQVKAVEAELGTIRRWRVDGFFSPSKLRLRPLQMSKEGIKKESAPELSKIIDRPGWLPAVNKLFSDGNVTVVRRDSLGRVRLESTAHLPVTWKVQ

SEQ ID NO: 394 - protein, 1084 aa, Corynebacterium diphtheriae
MKYHVGIDVGTFSVGLAAIEVDDAGMPIKTLSLVSHIHDSGLDPDKIKSAVTRLASSGIARRTRRLYRRKRRRLQQLDKFIQRQGWPVIELEDYSDPLYPWKVRAELAASYIADEKERGEKLSVALRHIARHRGWRNPYAKVSSLYLPDEPSDAFKAIREEIKRASGQPVPETATVGQMVTLCELGTLKLRGEGGVLSARLQQSDHAREIQEICRMQEIGQELYRKIIDVVFAAESPKGSASSRVGKDPLQPGKNRALKASDAFQRYRIAALIGNLRVRVDGEKRILSVEEKNLVFDHLVNLAPKKEPEWVTIAEILGIDRGQLIGTATMTDDGERAGARPPTHDTNRSIVNSRIAPLVDWWKTASALEQHAMVKALSNAEVDDFDSPEGAKVQAFFADLDDDVHAKLDSLHLPVGRAAYSEDTLVRLTRRMLADGVDLYTARLQEFGIEPSWTPPAPRIGEPVGNPAVDRVLKTVSRWLKSATKTWGAPERVIIEHVREGFVTEKRAREMDGDMRRRAARNAKLFQEMQEKLNVQGKPSRADLWRYQSVQRQNCQCAYCGSPITFSNSEMDHIVPRAGQGSTNTRENLVAVCHRCNQSKGNTPFAIWAKNTSIEGVSVKEAVERTRHWVTDTGMRSTDFKKFTKAVVERFQRATMDEEIDARSMESVAWMANELRSRVAQHFASHGTTVRVYRGSLTAEARRASGISGKLEFLDGVGKSRLDRRHHAIDAAVIAFTSDYVAETLAVRSNLKQSQAHRQEAPQWREFTGKDAEHRAAWRVWCQKMEKLSALLTEDLRDDRVVVMSNVRLRLGNGSAHEETIGKLSKVKLGSQLSVSDIDKASSEALWCALTREPDFDPKDGLPANPERHIRVNGTHVYAGDNIGLFPVSAGSIALRGGYAELGSSFHHARVYKITSGKKPAFAMLRVYTIDLLPYRNQDLFSVELKPQTMSMRQAEKKLRDALATGNAEYLGWLVVDDELVVDTSKIATDQVKAVEAELGTIRRWRVDGFFGDTRLRLRPLQMSKEGIKKESAPELSKIIDRPGWLPAVNKLFSEGNVTVVRRDSLGRVRLESTAHLPVTWKVQ

SEQ ID NO: 395 - protein, 1084 aa, Corynebacterium diphtheriae
MKYHVGIDVGTFSVGLAAIEVDDAGMPIKTLSLVSHIHDSGLDPDKIKSAVTRLASSGIARRTRRLYRRKRRRLQQLDKFIQRQGWPVIELEDYSDPLYPWKVRAELAASYIADEKERGEKLSVALRHIARHRGWRNPYAKVSSLYLPDEPSDAFKAIREEIKRASGQPVPETATVGQMVTLCELGTLKLRGEGGVLSARLQQSDHAREIQEICRMQEIGQELYRKIIDVVFAAESPKGSASSRVGKDPLQPGKNRALKASDAFQRYRIAALIGNLRVRVDGEKRILSVEEKNLVFDHLVNLAPKKEPEWVTIAEILGIDRGQLIGTATMTDDGERAGARPPTHDTNRSIVNSRIAPLVDWWKTASALEQHAMVKALSNAEVDDFDSPEGAKVQAFFADLDDDVHAKLDSLHLPVGRAAYSEDTLVRLTRRMLADGVDLYTARLQEFGIEPSWTPPAPRIGEPVGNPAVDRVLKTVSRWLESATKTWGAPERVIIEHVREGFVTEKRAREMDGDMRRRAARNAKLFQEMQEKLNVQGKPSRADLWRYQSVQRQNCQCAYCGSPITFSNSEMDHIVPRAGQGSTNTRENLVAVCHRCNQSKGNTPFAIWAKNTSIEGVSVKEAVERTRHWVTDTGMRSTDFKKFTKAVVERFQRATMDEEIDARSMESVAWMANELRSRVAQHFASHGTTVRVYRGSLTAEARRASGISGKLEFLDGVGKSRLDRRHHAIDAAVIAFTSDYVAETLAVRSNLKQSQAHRQEAPQWREFTGKDAEHRAAWRVWCQKMEKLSALLTEDLRDDRVVVMSNVRLRLGNGSAHEETIGKLSKVKLGSQLSVSDIDKASSEALWCALTREPDFDPKDGLPANPERHIRVNGTHVYAGDNIGLFPVSAGSIALRGGYAELGSSFHHARVYKITSGKKPAFAMLRVYTIDLLPYRNQDLFSVELKPQTMSMRQAEKKLRDALATGNAEYLGWLVVDDELVVDTSKIATDQVKAVEAELGTIRRWRVDGFFGDTRLRLRPLQMSKEGIKKESAPELSKIIDRPGWLPAVNKLFSEGNVTVVRRDSLGRVRLESTAHLPVTWKVQ

SEQ ID NO: 396 - protein, 1084 aa, Corynebacterium diphtheriae
MKYHVGIDVGTFSVGLAAIEVDDAGMPIKTLSLVSHIHDSGLDPDKMKSAVTRLASSGIARRTRRLYRRKRRRLQQLDKFIQRQGWPVIELEDYSDPLYPWKVRAELAASYIADEKERGEKLSVALRHIARHRGWRNPYAKVSSLYLPDEPSDAFKSIREEIKRASGQPVPETATVGQMVTLCELGTLKLRGEGGVLSARLQQSDHAREIQEICRMQEIGQELYRKIIDVVFAAESPKGSASSRVGKDPLQPGKNRALKASDSFQRYRIAALISNLRVRVDGEKRILSVEEKNLVFDHLVNLAPKKEPEWVTIAEILGIDRGQLIGTATMTDDGERAGARPPTHDTNRSIVNSRIAPLVDWWKTASALEQHAMVKALSNAEVDDFDSPEGAKVQAFFADLDDDVHAKLDSLHLPVGRAAYSEDTLVRLTRRMLADGVDLYTARLQEFGIEPSWTPPAPRIGEPVGNPAVDRVLKTVSRWLESATKTWGAPERVIIEHVRDGFVTEKRAREMDGDMRRRAARNAKLFQEMQEKLNVQGKPSRADLWRYQSVQRQNCQCAYCGSPITFSNSEMDHIVPRAGQGSTNTRENLVAVCHRCNQSKGNTPFAIWAKNTSIEGVSVKEAVERTRHWVTDTGMRSTDFKKFTKAVVERFQRATMDEEIDARSMESVAWMANELRSRVAQHFASHGTTVRVYRGSLTAEARRASGISGKLEFLDGVGKSRLDRRHHAIDAAVIAFTSDYVAETLAVRSNLKQSQAHRQEAPQWREFTGKDAEHRAAWRVWCQKMEKLSALLTEDLRDDRVVVMSNVRLRLGNGSAHEETIGKLSKVKLGSQLSVSDIDKASSEALWCALTREPDFDPKDGLPANPERHIRVNGTHVYAGDNIGLFPVSAGSIALRGGYAELGSSFHHARVYKITSGKKPAFAMLRVYTIDLLPYRNQDLFSVELKPQTMSMRQAEKKLRDALATGNAEYLGWLVVDDELVVDTSKIATDQVKAVEAELGTIRRWRVDGFFGDTRLRLRPLQMSKEGIKKELAPELSKIIDRPGWLPAVNKLFSEGNVTVVRRDSLGRVRLESTAHLPVTWKVQ

SEQ ID NO: 397 - protein, 1084 aa, Corynebacterium diphtheriae
MKYHVGIDVGTFSVGLAAIEVDDAGMPIKTLSLVSHIHDSGLDPDKMKSAVTRLASSGIARRTRRLYRRKRRRLQQLDKFIQRQGWPVIELEDYSDPLYPWKVRAELAASYIADEKERGEKLSVALRHIARHRGWRNPYAKVSSLYLPDEPSDAFKSIREEIKRASGQPVPETATVGQMVTLCELGTLKLRGEGGVLSARLQQSDHAREIQEICRMQEIGQELYRKIIDVVFAAESPKGSASSRVGKDPLQPGKNRALKASDAFQRYRIAALIGNLRVRVDGEKRILSVEEKNLVFDHLVNLAPKKEPEWVTIAEILGIDRGQLIGTATMTDDGERAGARPPTHDTNRSIVNSRIAPLVDWWKTASALEQHAMVKALSNAEVDDFDSPEGAKVQAFFADLDDDVHAKLDSLHLPVGRAAYSEDTLVRLTRRMLADGVDLYTARLQEFGIEPSWTPPAPRIGEPVGNPAVDRVLKTVSRWLESATKTWGAPERVIIEHVREGFVTEKRAREMDGDMRRRAARNAKLFQEMQEKLNVQGKPSRADLWRYQSVQRQNCQCAYCGSPITFSNSEMDHIVPRAGQGSTNTRENLVAVCHRCNQSKGNTPFAIWAKNTSIEGVSVKEAVERTRHWVTDTGMRSTDFKKFTKAVVERFQRATMDEEIDARSMESVAWMANELRSRVAQHFASHGTTVRVYRGSLTAEARRASGISGKLEFLDGVGKSRLDRRHHAIDAAVIAFTSDYVAETLAVRSNLKQSQAHRQEAPQWREFTGKDAEHRAAWRVWCQKMEKLSALLTEDLRDDRVVVMSNVRLRLGNGSAHEETIGKLSKVKLGSQLSVSDIDKASSEALWCALTREPDFDPKDGLPANPERHIRVNGTHVYAGDNIGLFPVSAGSIALRGGYAELGSSFHHARVYKITSGKKPAFAMLRVYTIDLLPYRNQDLFSVELKPQTMSMRQAEKKLRDALATGNAEYLGWLVVDDELVVDTSKIATDQVKAVEAELGTIRRWRVDGFFGDTRLRLRPLQMSKEGIKKESAPELSKIIDRPGWLPAVNKLFSEGNVTVVRRDSLGRVRLESTAHLPVTWKVQ

SEQ ID NO: 398 - protein, 1084 aa, Corynebacterium diphtheriae
MKYHVGIDVGTFSVGLAAIEVDDAGMPIKTLSLVSHIHDSRLDPDKIKSAVTRLASSGIARRTRRLYRRKRRRLQQLDKFIQRQGWPVIELEDYSDPLYPWKVRAELAASYIADEKERGEKLSVALRHIARHRGWRNPYAKVSSLYLPDEPSDAFKAIREEIKRASGQPVPETATVGQMVTLCELGTLKLRGEGGVLSARLQQSDHAREIQEICRMQEIGQELYRKIIDVVFAAESPKGSASSRVGKDPLQPGKNRALKASDAFQRYRIAALIGNLRVRVDGEKRILSVEEKNLVFDHLVNLAPKKEPEWVTIAEILGIDRGQLIGTATMTDDGERAGARPPTHDTNRSIVNSRIAPLVDWWKTASALEQHAMVKALSNAEVDDFDSPEGAKVQAFFADLDDDVHAKLDSLHLPVGRAAYSEDTLVRLTRRMLADGVDLYTARLQEFGIEPSWTPPAPRIGEPVGNPAVDRVLKTVSRWLESATKTWGAPERVIIEHVREGFVTEKRAREMDGDMRRRAARNAKLFQEMQEKLNIQGKPSRADLWRYQSVQRQNCQCAYCGSPITFSNSEMDHIVPRAGQGSTNTRENLVAVCHRCNQSKGNTPFAIWAKNTSIEGVSVKEAVERTRHWVTDTGMRSTDFKKFTKAVVERFQRVTMDEEIDARSMESVAWMANELRSRVAQHFASRGTTVRVYRGSLTAEARRASGISGKLEFLDGVGKSRLDRRHHAIDAAVIAFTSDYVAETLAVRSNLKQSQAHRQEAPQWREFTGKDAEHRAAWRVWCQKMEKLSALLTEDLRDDRVVVMSNVRLRLGNGSAHEETIGKLSKVKLGSQLSVSDIDKASSEALWCALTREPDFDPKDGLPANPERHIRVNGTHVYAGDNIGLFPVSAGSIALRGGYAELGSSFHHARVYKITSGKKPAFAMLRVYTIDLLPYRNQDLFSVELKPQTMSMRQAEKKLRDALATGNAEYLGWLVVDDELVVDTSKIATDQVKAVEAELGTIRRWRVDGFFGDTRLRLRPLQMSKEGIKKESAPELSKIIDRPGWLPAVNKLFSEGNVTVVRRDSLGRVRLESTAHLPVTWKVQ

SEQ ID NO: 399 - protein, 1069 aa, Corynebacterium matruchotii
MAAIAIDDDGKPTEILSAISLIHDSGVDPDSAKSAATRLATSGIARRTRRLYRRKRKRLAKLDKFISSQGWPLKEFEKYEDPFYPWRVRAELATTAITDQQELGEKLSIALRHIARHRGWRNPYSKVTALYTVTEPSDAFLAMQEECAKQLGRTIPETITVGQLVTGMNLGKTRLRGENSLLAARPRQSDNANEIHTIAKVQGLSNELVRQIIDHVFAAESPKGSAAEQVGKDPLQPTKKRALKASDAFQQYRIAALIGNLRIRGGKGNRRLTTEETRLVFDYLRSLPAKQEPTWQLVAEQLKIDRGNLVGTAIMTDDGERAGAKPPVHDTNRIMENTKIKPLATWWKSADADARAAMVKALSNAEVDDFDSQAGAQVQEFFFGISDEDQEKLDGLHLPIGRAAYSEDTLDRLTKRMIGEGMDLYEARQAEFKISNDWAPPAPEIGERVGNPAVDRVLKATARWLNAAERQWGAPKSVNIEHVRAAFMSESSARELDRDNQQRAKRNVKVVAEMQEKLGIEGRPSRADVWRFQSIQRQNGKCAYCGAEISFKNSEMDHIIPQVGEGSTNTRDNLVAVCRECNSSKSNIAFAVWAENTSRPGVSVQKAIERTHHWVTDSGLRKPEFDKFRKQVCDRLRRKATDEPIDARSLESVAWMANELRSRIAQKFKDGDTKVRVYKGALTAEARRASGISGKLEFVDGKGKSRLDRRHHAVDAAVVAFTSNYVAETLALRSNMKFDQELRRKAPQWREFTGSDHVHQVEWTKWKYRMQALAELLNNALVQDRIVVMHNLRLRLGNGAAHEDTIGKLTRLKVGDAISTTDIDRASSEALWCALTRDPDYDPKTGLPENPNRTIRIHGTHLTASDEITVFPVAAASIPIRDGFAKLGSNYHHVRLFRVPSGKKYKYCLMQVYTVDLLKFRKEDLFTVELKPQTISVRTCEALLRKALANGTAEYLGWLVSDDELLIDTSSFDTPGIVKLREEYGPVNRWRLAGLTSVTRLNLRPLYLSKEGLKPNVNPEIKKIIDNRSWIITVNKLFSSGHVKIIRRDALGRPRLHSAAHLPICWEVK

SEQ ID NO: 400 - protein, 210 aa, Diplosphaera colitermitum
MSDILDKPIVLSLNRAWQVIGHRTVKQALVALNGGNADLPPALGLDIAYPKFDDGAWNFDRPLFLNPLPWSEWIELPVRDFDFAITTPRLRIRVPTVIVATQFAKMPVRIPRLTREAIFERDGGVCQYTGEHVGKHGGNLDHVVPRDRGGRDSFENLVWAKREINSLKANRLPHEAGLRLLRRPKAPAPLPASMTIREARHPDWRHFLTP

SEQ ID NO: 401 - protein, 1332 aa, Dolosigranulum pigrum
MQKNYTIGLDIGTNSVGWAVMKDDYTLIRKRMKVLGNTDIKKIKKNFWGVRLFDEGETAKETRLKRGTRRRYQRRRNRLIYLQDIFQQPMLAIDENFFHRLDDSFFVPDDKSYDRHPIFGSLEEEVAYHNTYPTIYHLRKHLADNPEKADLRLVYTALAHIVKYRGHFLIEGELNTENTSISETFEQFLDTYSDIFKEQLVGDISKVEEILSSKQSRSRKHEQIMALFPNENKLGNFGRFMMLIVGNTSNFKPVFDLDDEYKLKLSDETYEEDLDTLLGMTDDVFLDVFMAAKNVYDAVEMSAIISTDTGNSKAVLSNQMINFYDEHKVDLAQLKQFFKTHLPDKYYECFSDPSKNGYAGYIDGKTNQEDFYKYIEKVMKTIKSDKKDYFLDKIDREVFLRKQRSFYNSVIPHQIHLQEMQAILDRQSQYYPFLAENRDKIESLVTFRIPYYVGPLTVSDQSEFAWMERQSDEPIRPWNFDEIVNKERSAEKFIERMTNMDTYLLEEKVLPKRSLLYQTFEVYNELTKVRYTNEQGKTEKLNRQQKAEIIETLFKQKNRVREKDIANYLEQYGYVDGTDIKGVEDKFNASLSTYNDLAKIDGAKAYLDDPEYADVWEDIIKILTIFEDKAMRKKQLQTYSDTLSPEILKKLERKHYTGWGRFSKKLINGLRDEGSNKTILDYLKSDEGSSGPTNRNFMQLIRDNTLSFKKKIEDAQTIEDTTHIYDTVAELPGSPAIKKGIRQALKIVEEIIDIIGYEPENIVVEMARESQTTKKGKDLSKERLEKLTEAIKEFDGPSDVKVKDLKNENLRNDRLYLYYLQNGRDMYTNEPLDINNLSKYDIDHIIPQSFTTDNSIDNKVLVSRTKNQGNKSDDVPSINIVHKMKPFWRQLHKAGLISDRKFKNLTKAEHGGLTEADRAHFLNRQLVETRQITKHVANLLDSQYNTAEEQRINIVLLKSSMTSRFRKEFKLYKVREINDYHHGHDAYLNAVVATTIMKVYPNLKPQFVYGQYKKTSMFKEEKATARKHFYSNITKFFKKEKVVNEETGEILWDTERHLSTIKRVLSWKQMNIVKKVEKQKGQLWKETIYPKGDSSKLIPVKEGMDPQKYGGLSQVSEAFAVVITHEKGKKKQLKSDLISIPIVDQKAYEQHPTAYLEEAGYNNPTVLHELFKYQLFELEDGSRRMIASAKEFQKGNQMVLPLELVELLYHANRYDKVKFPDSIEYVHDNLAKFDDLLEYVIDFSNKYINADKNVQKIQKIYKEHGTEDVELTVESFVNLMTFTAMGAPATFKFYGESITRSRYTSITEFRGSTLIFQSITGLYETRYKLEDN

SEQ ID NO: 402 - protein, 921 aa, Enterococcus faecalis
MIPHQIHLAELQAIIHRQAAYYPFLKENQEKIEQLVTFRIPYYVGPLSKGDASTFAWLKRQSEEPIRPWNLQETVDLDQSATAFIERMTNFDTYLPSEKVLPKHSLLYEKFMVFNELTKISYTDDRGIKANFSGKEKEKIFDYLFKTRRKVKKKDIIQFYRNEYNTEIVTLSGLEEDQFNASFSTYQDLLKCGLTRAELDHPDNAEKLEDIIKILTIFEDRQRIRTQLSTFKGQFSAEVLKKLERKHYTGWGRLSKKLINGIYDKESGKTILGYLIKDDGVSKHYNRNFMQLINDSQLSFKNAIQKAQSSEHEETLSETVNELAGSPAIKKGIYQSLKIVDELVAIMGYAPKRIVVEMARENQTTSTGKRRSIQRLKIVEKAMAEIGSNLLKEQPTTNEQLRDTRLFLYYMQNGKDMYTGDELSLHRLSHYDIDHIIPQSFMKDDSLDNLVLVGSTENRGKSDDVPSKEVVKDMKAYWEKLYAAGLISQRKFQRLTKGEQGGLTLEDKAHFIQRQLVETRQITKNVAGILDQRYNANSKEKKVQIITLKASLTSQFRSIFGLYKVREVNDYHHGQDAYLNCVVATTLLKVYPNLAPEFVYGEYPKFQTFKENKATAKAIIYTNLLRFFTEDEPRFTKDGEILWSNSYLKTIKKELNYHQMNIVKKVEVQKGGFSKESIKPKGPSNKLIPVKNGLDPQKYGGFDSPIVAYTVLFTHEKGKKPLIKQEILGITIMEKTRFEQNRILFLEEKGFLRPRVLMKLPKYTLYEFPEGRRRLLASAKEAQKGNQMVLPEHLLTLLYHAKQCLLPNQSESLTYVEQHQPEFQEILERVVDFAEVHTLAKSKVQQIVKLFEANQTADVKEIAASFIQLMQFNAMGAPSTFKFFQKDIERARYTSIKEIFDATIIYQSTTGLYETRRKVVD

SEQ ID NO: 403 - protein, 1337 aa, Enterococcus faecalis; identical to SEQ ID NO: 115

SEQ ID NO: 404 - protein, 1337 aa, Enterococcus faecalis
MKKDYVIGLDIGTNSVGWAVMTEDYQLVKKKMPIYGNTEKKKIKKNFWGVRLFEEGHTAEDRRLKRTARRRISRRRNRLRYLQAFFEEAMTALDENFFARLQESFLVPEDKKWHRHPIFAKLEDEVAYHETYPTIYHLRKKLADSSEQADLRLIYLALAHIVKYRGHFLIEGKLSTENISVKEQFQQFMIIYNQTFVNGESRLVSAPLPESVLIEEELTEKASRTKKSEKVLQQFPQEKANGLFGQFLKLMVGNKADFKKVFGLEEEAKITYASESYEEDLEGILAKVGDEYSDVFLAAKNVYDAVELSTILADSDKKSHAKLSSSMIVRFTEHQEDLKNFKRFIRENCPDEYDNLFKNEQKDGYAGYITHAGKVSQLKFYQYVKKIIQDIAGAEYFLEKIAQENFLRKQRTFDNGVIPHQIHLAELQAIIHRQAAYYPFLKENQEKIEQLVTFRIPYYVGPLSKGDANTFAWLKRQSEEPIRPWNLQETVDLDQSATAFIERMTNFDTYLPSEKVLPKHSLLYEKFMVFNELTKISYTDDRGIKANFSGKEKEKIFDYLFKTRRKVKKKDIIQFYRNEYNTEIVTLSGLEEDQFNASFSTYQDLLKCGLTRAELDHPDNAEKLEDIIKILTIFEDRQRIRTQLSTFKGQFSAEVLKKLERKHYTGWGRLSKKLINGIYDKESGKTILDYLIKDDGVSKHYNRNFMQLINDSQLSFKNAIQKAQSSEHEETLSETVNELAGSPAIKKGIYQSLKIVDELVAIMGYAPKRIVVEMARENQTTSTGKRRSIQRLKIVEKAMAEIGSNLLKEQPTTNEQLRDTRLFLYYMQNGKDMYTGDELSLHRLSHYDIDHIIPQSFMKDDSLDNLVLVGSTENRGKSDDVPSKEVVKDMKAYWEKLYAAGLISQRKFQRLTKGEQGGLTLEDKAHFIQRQLVETRQITKNVAGILDQRYNAKSKEKKVQIITLKASLTSQFRSIFGLYKVREVNDYHHGQDAYLNCVVATTLLKVYPNLAPEFVYGEYPKFQTFKENKATAKAIIYTNLLRFFTEDEPRFTKDGEILWSNSYLKTIKKELNYHQMNIVKKVEVQKGGFSKESIKPKGPSNKLIPVKNGLDPQKYGGFDSPIVAYTVLFTHEKGKKPLIKQEILGITIMEKTRFEQNPILFLEEKGFLRPRVLMKLPKYTLYQFPEGRRRLLASAKEAQKGNQMVLPEHLLTLLYHAKQCLLPNQSESLAYVEQHQPEFQEILERVVDFAEVHTLAKSKVQQIVKLFEANQTADVKEIAASFIQLMQFNAMGAPSTFKFFQKDIERARYTSIKEIFDATIIYQSTTGLYETRRKVVD

SEQ ID NO: 405 - protein, 1337 aa, Enterococcus faecalis
MKKDYVIGLDIGTNSVGWAVMTEDYQLVKKKMPIYGNTEKKKIKKNFWGVRLFEEGHTAEDRRLKRTARRRISRRRNRLRYLQAFFEEAMTALDENFFARLQESFLVPEDKKWHRHPIFAKLEDEVAYHETYPTIYHLRKKLADSSEQADLRLIYLALAHIVKYRGHFLIEGKLSTENISVKEQFQQFMIIYNQTFVNGESRLVSTPLPESVLIEEELTEKASRTKKSEKVLQQFPQEKANGLFGQFLKLMVGNKADFKKVFGLEEEAKITYASESYEEDLEGILAKVGDEYSDVFLAAKNVYDAVELSTILADSDKKSHAKLSSSMIVRFTEHQEDLKNFKRFIRENCPDEYDNLFKNEQKDGYAGYITHAGKVSQLKFYQYVKKIIQDIAGAEYFLEKIAQENFLRKQRTFDNGVIPHQIHLAELQAIIHRQAAYYPFLKENQEKIEQLVTFRIPYYVGPLSKGDASTFAWLKRQSEEPIRPWNLQETVDLDQSATAFIERMTNFDTYLPSEKVLPKHSLLYEKFMVFNELTKISYTDDRGIKANFSGKEKEKIFDYLFKTRRKVKKKDIIQFYRNEYNTEIVTLSGLEEDQFNASFSTYQDLLKCGLTRAELDHPDNAEKLEDIIKILTIFEDRQRIRTQLSTFKGQFSAEVLKKLERKHYTGWGRLSKKLINGIYDKESGKTILDYLVKDDGVSKHYNRNFMQLINDSQLSFKNAIQKAQSSEHEETLSETVNELAGSPAIKKGIYQSLKIVDELVAIMGYAPKRIVVEMARENQTTSTGKRRSIQRLKIVEKAMAEIGSNLLKEQPTTNEQLRDTRLFLYYMQNGKDMYTGDELSLHRLSHYDIDHIIPQSFMKDDSLDNLVLVGSTENRGKSDDVPSKEVVKDMKAYWEKLYAAGLISQRKFQRLTKGEQGGLTLEDKAHFIQRQLVETRQITKNVAGILDQRYNAKSKEKKVQIITLKASLTSQFRSIFGLYKVREVNDYHHGQDAYLNCVVATTLLKVYPNLAPEFVYGEYPKFQTFKENKATAKAIIYTNLLRFFTEDEPRFTKDGEILWSNSYLKTIKKELNYHQMNIVKKVEVQKGGFSKESIKPKGPSNKLIPVKNGLDPQKYGGFDSPIVAYTVLFTHEKGKKPLIKQEILGITIMEKTRFEQNPILFLEEKGFLRPRVLMKLPKYTLYEFPEGRRRLLASAKEAQKGNQMVLPEHLLTLLYHAKQCLLPNQSESLAYVEQHQPEFQEILERVVDFAEVHTLAKSKVQQIVKLFEANQTADVKEIAASFIQLMQFNAMGAPSTFKFFQKDIERARYTSIKEIFDATIIYQSTTGLYETRRKVVD

SEQ ID NO: 406 - protein, 1337 aa, Enterococcus faecalis
MKKDYVIGLDIGTNSVGWAVMTEDYQLVKKKMPIYGNTEKKKIKKNFWGVRLFEEGHTAEDRRLKRTARRRISRRRNRLRYLQAFFEEAMTDLDENFFARLQESFLVPEDKKWHRHPIFAKLEDEVAYHETYPTIYHLRKKLADSSEQADLRLIYLALAHIVKYRGHFLIEGKLSTENISVKEQFQQFMIIYNQTFVNGESRLVSAPLPESVLIEEELTEKASRTKKSEKVLQQFPQEKANGLFGQFLKLMVGNKADFKKVFGLEEEAKITYASESYEEDLEGILAKVGDEYSDVFLAAKNVYDAVELSTILADSDKKSHAKLSSSMIVRFTEHQEDLKKFKRFIRENCPDEYDNLFKNEQKDGYAGYIAHAGKVSQLKFYQYVKKIIQDIAGAEYFLEKIAQENFLRKQRTFDNGVIPHQIHLAELQAIIHRQAAYYPFLKENQEKIEQLVTFRIPYYVGPLSKGDASTFAWLKRQSEEPIRPWNLQETVDLDQSATAFIERMTNFDTYLPSEKVLPKHSLLYEKFMVFNELTKISYTDDRGIKANFSGKEKEKIFDYLFKTRRKVKKKDIIQFYRNEYNTEIVTLSGLEEDQFNASFSTYQDLLKCGLTRAELDHPDNAEKLEDIIKILTIFEDRQRIRTQLSTFKGQFSAEVLKKLERKHYTGWGRLSKKLINGIYDKESGKTILGYLIKDDGVSKHYNRNFMQLINDSQLSFKNAIQKAQSSEHEETLSETVNELAGSPAIKKGIYQSLKIVDELVAIMGYAPKRIVVEMARENQTTSTGKRRSIQRLKIVEKAMAEIGSNLLKEQPTTNEQLRDTRLFLYYMQNGKDMYTGDELSLHRLSHYDIDHIIPQSFMKDDSLDNLVLVGSTENRGKSDDVPSKEVVKDMKAYWEKLYAAGLISQRKFQRLTKGEQGGLTLEDKAHFIQRQLVETRQITKNVAGILDQRYNANSKEKKVQIITLKASLTSQFRSIFGLYKVREVNDYHHGQDAYLNCVVATTLLKVYPNLAPEFVYGEYPKFQTFKENKATAKAIIYTNLLRFFTEDEPRFTKDGEILWSNSYLKTIKKELNYHQMNIVKKVEVQKGGFSKESIKPKGPSNKLIPVKNGLDPQKYGGFDSPIVAYTVLFTHEKGKKPLIKQEILGITIMEKTRFEQNPILFLEEKGFLRPRVLMKLPKYTLYEFPEGRRRLLASAKEAQKGNQMVLPEHLLTLLYHAKQCLLPNQSESLAYVEQHQPEFQEILERVVDFAEVHTLAKSKVQQIVKLFEANQTADVKEIAASFIQLMQFNAMGAPSTFKFFQKDIERARYTSIKEIFDATIIYQSTTGLYETRRKVVD

SEQ ID NO: 407 - protein, 936 aa, Enterococcus faecalis
MKKDYVIGLDIGTNSVGWAVMTEDYQLVKKKMPIYGNTEKKKIKKNFWGVRLFEEGHTAEDRRLKRTARRRISRRRNRLRYLQAFFEEAMTDLDENFFARLQESFLVPEDKKWHRHPIFAKLEDEVAYHETYPTIYHLRKKLADSSEQADLRLIYLALAHIVKYRGHFLIEGKLSTENISVKEQFQQFMIIYNQTFVNGESRLVSAPLPESVLIEEELTEKASRTKKSEKVLQQFPQEKANGLFGQFLKLMVGNKADFKKVFGLEEEAKITYASESYEEDLEGILAKVGDEYSDVFLAAKNVYDAVELSTILADSDKKSHAKLSSSMIVRFTEHQEDLKKFKRFIRENCPDEYDNLFKNEQKDGYAGYIAHAGKVSQLKFYQYVKKIIQDIAGAEYFLEKIAQENFLRKQRTFDNGVIPHQIHLAELQAIIHRQAAYYPFLKENQEKIEQLVTFRIPYYVGPLSKGDASTFAWLKRQSEEPIRPWNLQETVDLDQSATAFIERMTNFDTYLPSEKVLPKHSLLYEKFMVFNELTKISYTDDRGIKANFSGKEKEKIFDYLFKTRRKVKKKDIIQFYRNEYNTEIVTLSGLEEDQFNASFSTYQDLLKCGLTRAELDHPDNAEKLEDIIKILTIFEDRQRIRTQLSTFKGQFSAEVLKKLERKHYTGWGRLSKKLINGIYDKESGKTILGYLIKDDGVSKHYNRNFMQLINDSQLSFKNAIQKAQSSEHEETLSETVNELAGSPAIKKGIYQSLKIVDELVAIMGYAPKRIVVEMARENQTTSTGKRRSIQRLKIVEKAMAEIGSNLLKEQPTTNEQLRDTRLFLYYMQNGKDMYTGDELSLHRLSHYDIDHIIPQSFMKDDSLDNLVLVGSTENRGKSDDVPSKEVVKDMKAYWEKLYAAGLISQRKFQRLTKGEQGGLTLEDKAHFIQRQLVETR

SEQ ID NO: 408 - protein, 1337 aa, Enterococcus faecalis
MKKDYVIGLDIGTNSVGWAVMTEDYQLVKKKMPIYGNTEKKKIKKNFWGVRLFEEGHTAEDRRLKRTARRRISRRRNRLRYLQAFFEEAMTDLDENFFARLQESFLVPEDKKWHRHPIFAKLEDEVAYHETYPTIYHLRKKLADSSEQADLRLIYLALAHIVKYRGHFLIEGKLSTENISVKEQFQQFMIIYNQTFVNGESRLVSAPLPESVLIEEELTEKASRTKKSEKVLQQFPQEKANGLFGQFLKLMVGNKADFKKVFGLEEEAKITYASESYEEDLEGILAKVGDEYSDVFLAAKNVYDAVELSTILADSDKKSHAKLSSSMIVRFTEHQEDLKKFKRFIRENCPDEYDNLFKNEQKDGYAGYIAHAGKVSQLKFYQYVKKIIQDIAGAEYFLEKIAQENFLRKQRTFDNGVIPHQIHLAELQAIIHRQAAYYPFLKENQEKIEQLVTFRIPYYVGPLSKGDASTFAWLKRQSEEPIRPWNLQETVDLDQSATAFIERMTNFDTYLPSEKVLPKHSLLYEKFMVFNELTKISYTDDRGIKANFSGKEKEKIFDYLFKTRRKVKKKDIIQFYRNEYNTEIVTLSGLEEDQFNASFSTYQDLLKCGLTRAELDHPDNAEKLEDIIKILTIFEDRQRIRTQLSTFKGQFSAEVLKKLERKHYTGWGRLSKKLINGIYDKESGKTILDYLVKDDGVSKHYNRNFMQLINDSQLSFKNAIQKAQSSEHEETLSETVNELAGSPAIKKGIYQSLKIVDELVAIMGYAPKRIVVEMARENQTTSTGKRRSIQRLKIVEKAMAEIGSNLLKEQPTTNEQLRDTRLFLYYMQNGKDMYTGDELSLHRLSHYDIDHIIPQSFMKDDSLDNLVLVGSTENRGKSDDVPSKEVVKDMKAYWEKLYAAGLISQRKFQRLTKGEQGGLTLEDKAHFIQRQLVETRQITKNVAGILNQRYNANSKEKKVQIITLKASLTSQFRSIFGLYKVREVNDYHHGQDAYLNCVVATTLLKVYPNLAPEFVYGEYPKFQTFKENKATAKAIIYTNLLRFFTEDEPRFTKDGEILWSNSYLKTIKKELNYHQMNIVKKVEVQKGGFSKESIKPKGPSNKLIPVKNGLDPQKYGGFDSPVVAYTVLFTHEKGKKPLIKQEILGITIMEKTRFEQNPILFLEEKGFLRPRVLMKLPKYTLYEFPEGRRRLLASAKEAQKGNQMVLPEHLLTLLYHAKQCLLPNQSESLAYVEQHQPEFQEILERVVDFAEVHTLAKSKVQQIVKLFEANQTADVKEIAASFIQLMQFNAMGAPSTFKFFQKDIERARYTSIKEIFDATIIYQSTTGLYETRRKVVD

SEQ ID NO: 409 - protein, 1337 aa, Enterococcus faecalis
MKKDYVIGLDIGTNSVGWAVMTEDYQLVKKKMPIYGNTEKKKIKKNFWGVRLFEEGHTAEDRRLKRTARRRISRRRNRLRYLQAFFEEAMTDLDENFFARLQESFLVPEDKKWHRHPIFAKLEDEVAYHETYPTIYHLRKKLADSSEQADLRLIYLALAHIVKYRGHFLIEGKLSTENISVKEQFQQFMIIYNQTFVNGESRLVSAPLPESVLIEEELTEKASRTKKSEKVLQQFPQEKANGLFGQFLKLMVGNKADFKKVFGLEEEAKITYASESYEEDLEGILAKVGDEYSDVFLAAKNVYDAVELSTILADSDKKSHAKLSSSMIVRFTEHQEDLKKFKRFIRENCPDEYDNLFKNEQKDGYAGYIAHAGKVSQLKFYQYVKKIIQDIAGAEYFLEKIAQENFLRKQRTFDNGVIPHQIHLAELQAIIHRQAAYYPFLKENQEKIEQLVTFRIPYYVGPLSKGDASTFAWLKRQSEEPIRPWNLQETVDLDQSATAFIERMTNFDTYLPSEKVLPKHSLLYEKFMVFNELTKISYTDDRGIKANFSGKEKEKIFDYLFKTRRKVKKKDIIQFYRNEYNTEIVTLSGLEEDQFNASFSTYQDLLKCGLTRAELDHPDNAEKLEDIIKILTIFEDRQRIRTQLSTFKGQFSAEVLKKLERKHYTGWGRLSKKLINGIYDKESGKTILGYLIKDDGVSKHYNRNFMQLINDSQLSFKNAIQKAQSSEHEETLSETVNELAGSPAIKKGIYQSLKIVDELVAIMGYAPKRIVVEMARENQTTSTGKRRSIQRLKIVEKAMAEIGSNLLKEQPTTNEQLRDTRLFLYYMQNGKDMYTGDELSLHRLSHYDIDHIIPQSFMKDDSLDNLVLVGSTENLGKSDDVPSKEVVKDMKAYWEKLYAAGLISQRKFQRLTKGEQGGLTLEDKAHFIQRQLVETRQITKNVAGILDQRYNANSKEKKVQIITLKASLTSQFRSIFGLYKVREVNDYHHGQDAYLNCVVATTLLKVYPNLAPEFVYGEYPKFQTFKENKATAKAIIYTNLLRFFTEDEPRFTKDGEILWSNSYLKTIKKELNYHQMNIVKKVEVQKGGFSKESIKPKGPSNKLIPVKNGLDPQKYGGFDSPIVAYTVLFTHEKGKKPLIKQEILGITIMEKTRFEQNPILFLEEKGFLRPRVLMKLPKYTLYEFPEGRRRLLASAKEAQKGNQMVLPEHLLTLLYHAKQCLLPNQSESLAYVEQHQPEFQEILERVVDFAEVHTLAKSKVQQIVKLFEANQTADVKEIAASFIQLMQFNAMGAPSTFKFFQKDIERARYTSIKEIFDATIIYQSTTGLYETRRKVVD

SEQ ID NO: 410 - protein, 1337 aa, Enterococcus faecalis
MKKDYVIGLDIGTNSVGWAVMTEDYQLVKKKMPIYGNTEKKKIKKNFWGVRLFEEGHTAEDRRLKRTARRRISRRRNRLRYLQAFFEEAMTDLDENFFARLQESFLVPEDKKWHRHPIFAKLEDEVAYHETYPTIYHLRKKLADSSEQADLRLIYLALAHIVKYRGHFLIEGKLSTENTSVKEQFQQFMVIYNQTFVNGESRLVSAPLPESVLIEEELTEKASRTKKSEKVLQQFPQEKANGLFGQFLKLMVGNKADFKKVFGLEEEAKITYASESYEEDLEGILAKVGDEYSDVFLAAKNVYDAVELSTILADSDKKSHAKLSSSMIVRFTEHQEDLKKFKRFIRENCPDEYDNLFKNEQKDGYAGYIAHAGKVSQLKFYQYVKKIIQDIAGAEYFLEKIAQENFLRKQRTFDNGVIPHQIHLAELQAIIHRQAAYYPFLKENQEKIEQLVTFRIPYYVGPLSKGDASTFAWLKRQSEEPIRPWNLQETVDLDQSATAFIERMTNFDTYLPSEKVLPKHSLLYEKFMVFNELTKISYTDDRGIKANFSGKEKEKIFDYLFKTRRKVKKKDIIQFYRNEYNTEIVTLSGLEEDQFNASFSTYQDLLKCGLTRAELDHPDNAEKLEDIIKILTIFEDRQRIRTQLSTFKGQFSAEVLKKLERKHYTGWGRLSKKLINGIYDKESGKTILDYLVKDDGVSKHYNRNFMQLINDSQLSFKNAIQKAQSSEHEETLSETVNELAGSPAIKKGIYQSLKIVDELVAIMGYAPKRIVVEMARENQTTSTGKRRSIQRLKIVEKAMAEIGSNLLKEQPTTNEQLRDTRLFLYYMQNGKDMYTGDELSLHRLSHYDIDHIIPQSFMKDDSLDNLVLVGSTENRGKSDDVPSKKVVKKMKAYWEKLYAAGLISQRKFQRLTKGEQGGLTLEDKAHFIQRQLVETRQITKNVAGILDQRYNAKSKEKKVQIITLKASLTSQFRSIFGLYKVREVNDYHHGQDAYLNCVVATTLLKVYPNLAPEFVYGEYPKFQAFKENKATAKTIIYTNLMRFFTEDEPRFTKDSEILWSNSYLKTIKKELNYHQMNIVKKVEVQKGGFSKESIKPKGPSNKLIPVKNGLDPQKYGGFDSPVVAYTVLFTHEKGKKPLIKQEILGITIMEKTRFEQNPILFLEEKGFLRPRVLMKLPKYTLYEFPEGRRRLLASAKEAQKGNQMVLPEHLLTLLYHAKQCLLPNQSESLAYVEQHQPEFQEILERVVDFAEVHTLAKSKVQQIVKLFEANQTADVKEIAASFIQLMQFNAMGAPSTFKFFQKDIERARYTSIKEIFDATIIYQSTTGLYETRRKVVD

SEQ ID NO: 411 - protein, 1150 aa, Enterococcus faecalis
MYSIGLDLGISSVGWSVIDERTGNVIDLGVRLFSAKNSEKNLERRTNRGGRRLIRRKTNRLKDAKKILAAVGFYEDKSLKNSCPYQLRVKGLTEPLSKGEIYKVTLHILKKRGISYLDEDDTEAAKESQDYKEQVRENAQLLTKYTPGQIQLQRLKENNRVKTGINAQGNYQLNVFKVSAYANELATILKTQQAFYPNELTDDWIALFVQPGIAEEAGLIYRKRPYYHGPGNEANNSPYGRWSDFKKTGQPATNIFDKLIGKDFQGELRASGLSLSAQQYNLLNDLTNLKIDGEIPLSPEQKEYILAELMTKEFTRFGVNDVVKLLGVKKERLSGWRLDKKGKPEIHTLKGYRNWRKIFAESGIDLAMLPTETIDCLAKILTLNTEREGIENTLAFELPELAESVKLLVLDRYKELSQSVSTQAWHRFSLKTLHLLIPELMNATSEQNTLLEQFQLKSDVRKRYSEYKKLPTKDVLTEIYNPTVNKTVSQAFKVIDALLVKYGKEQIRYITIEMPRDDNEEDEKKRIKELHAKNSQRKNDSQSYFMQKSGWSQEKFQTTIQKNRRFLAKLLYYYEQDGICAYTGLSISPELLVSDSTEIDHIIPISISLDDSINNKVLVLSKANQVKGQQTPYDAWMDGSFKKINGKFSNWDDYQKWVESRHFSHKKENNLLETRNIFDSEQVEKFLARNLNDTRYASRLVLNTLQSFFANQETKVRVVNGSFTHTLRKKWGADLDKTRETHHHHAVDATLCAVTPFVKVSRYHYAVKEETGEKVMREIDFETGEIVDEMSYREFKKSKKYERKTYQVKWPNFREQLKPVNLHPRIKFSHQVDRKANRKLSDATIYSVREKTEVKTLKSGKQKITTDEYTIGKIKDIYTVDGWEAFKKKQDKLLMKDLDEKTYERLLSIAETTPDFQEVEEKNGKVKRVKRSPFAVYCEENDIPAIRKYAKKNNGPLIRSLKYYDGKLNKHINITKDSQGRPVEKTKNGRKVTLQSLKPYRYDIYQDLETKAYYTVQLYYSDLRFVEGKYGITEKEYMKKVAEQTKGQVVRFCFSLQKNDGLEIEWKDSQRYDVRFYNFQSANSINFKGLEQEMMPAENQFKQKPYNNGAINLNIAKYGKEGKKLRKFNTDILGKKHYLYYEKEPKNIIK

SEQ ID NO: 412 - protein, 1150 aa, Enterococcus faecalis
MYSIGLDLGISSVGWSVIDERTGNVIDLGVRLFSAKNSEKNLERRTNRGGRRLIRRKTNRLKDAKKILAAVGFYEDKSLKNSCPYQLRVKGLTEPLSKGEIYKVTLHILKKRGISYLDEDDTEAAKESQDYKEQVRKNAQLLTKYTPGQIQLQRLKENNRVKTGINAQGNYQLNVFKVSAYANELATILKTQQAFYPNELTDDWIALFVQPGIAEEAGLIYRKRPYYHGPGNEANNSPYGRWSDFKKTGQPATNIFDRLIGKDFQGELRASGLSLSAQQYNLLNDLTNLKIDGEIPLSPEQKEYILAELMTKEFTRFGVNDVAKLLGVKKERLSGWRLDKKGKPEIHTLKGYRNWRKIFAESGIDLATLPTETIDCLAKVLTLNTEHEGIENTLAFELPELAESVKLLVLDRYKELSQSVSTQAWHRFSLKTLHLLIPELMNATSEQNTLLEQFQLKSDVRKRYSEYKKLPTKDVLTEIYNPTVNKTVSQAFKVIDALLVKYGKEQIRYITIEMPRDDNEEDEKKRIKELHAKNSQRKNDSQSYFMQKSGWSQEKFQTTIQKNRRFLAKLLYYYEQDGICAYTGLSISPELLVSDSTEIDHIIPISISLDDSINNKVLVLSKANQVKGQQTPYDAWMDGSFKKINGKFSNWDDYQKWVESRHFSHKKENNLLETRNIFDSEQVEKFLARNLNDTRYASRLVLNTLQSFFANHETKVRVVNGSFTHTLRKKWGADLDKTRETHHHHAVDATLCAVTPFVKVSRYHYAVKEETGEKVMREIDFETGEIVDEMSYQEFKKSKKYERKTYQVKWPNFREQLKPVNLHPRIKFSHQVDRKANRKLSDATIYSVREKTEVKTLKSGKQKITTDEYTIGKIKDIYTVDGWEAFKKKQDKLLMKDLDEKTYERLLSIAETTPDFQEVEEKNGKVKRVKRSPFAVYCEENDIPAIQKYAKKNNGPLIRSLKYYDGKLNKHINITKDSQGRPVEKTKNGRKVTLQSLKPYRYDIYQDLETKAYYTVQLYYSDLRFVEGKYGITEKEYMKKVAEQTKGQVVRFCFSLQKNDGLEIEWKDSQRYDVRFYNFQSANSINFKGLEQEMMPAENQFKQKPYNNGAINLNIAKYGKEGKKLRKFNTDILGKKHYLYYEKEPKNIIK

SEQ ID NO: 413 - protein, 1150 aa, Enterococcus faecalis
MYSIGLDLGISSVGWSVIDERTGNVIDLGVRLFSAKNSEKNLERRTNRGGRRLIRRKTNRLKDAKKILAAVGFYEDKSLKNSCPYQLRVKGLTEPLSKGEIYKVTLHILKKRGISYLDEDDTEAAKESQDYKEQVRKNAQLLTKYTPGQIQLQRLKENNRVKTGINVQGNYQLNVFKVSAYANELATILKTQQAFYPNELTDDWIALFVQPGIAEEAGLIYRKRPYYHGPGNEANNSPYGRWSDFQKTGEPATNIFDKLIGKDFQGELRASGLSLSAQQYNLLNDLTNLKIDGEVPLSSEQKEYILTELMTKEFTRFGVNDVVKLLGVKKERLSGWRLDKKGKPEIHTLKGYRNWRKIFAEAGIDLATLPTETIDCLAKVLTLNTEREGIENTLAFELPELSESVKLLVLDRYKELSQSISTQSWHRFSLKTLHLLIPELMNATSEQNTLLEQFQLKSDVRKRYSEYKKLPTKDVLAEIYNPTVNKTVSQAFKVIDALLVKYGKEQIRYITIEMPRDDNEEDEKKRIKELHAKNSQRKNDSQSYFMQKSGWSQEKFQTTIQKNRRFLAKLLYYYEQDGICAYTGLPISPELLVSDSTEIDHIIPISISLDDSINNKVLVLSKANQVKGQQTPYDAWMDGSFKKINGKFSNWDDYQKWVESRHFSHKKENNLLETRNIFDSEQVEKFLARNLNDTRYASRLVLNTLQSFFTNQETKVRVVNGSFTHTLRKKWGADLDKTRETHHHHAVDATLCAVTPFVKVSRYHYAVKEETGEKVMREIDFETGEIVNEMSYREFKKSKKYERKTYQVKWPNFREQLKPVNLHPRIKFSHQVDRKANRKLSDATIYSVREKTEVKTLKSGKQKITTDEYTIGKIKDIYTLDGWEAFKKKQDKLLMKDLDEKTYERLLSIAETTPDFQEVEEKNGKVKRVKRSPFAVYCEENDIPAIQKYAKKNNGPLIRSLKYYDGKLNKHINITKDSQGRPVEKTKNGRKVTLQSLKPYRYDIYQDLETKAYYTVQLYYSDLRFVEGKYGITEKEYMKKVAEQTKGQVVRFCFSLQKNDGLEIEWKDSQRYDVRFYNFQSANSINFKGLEQEIMPAENQFKQKPYNNGAINLNIAKYGKEGKKLRKFNTDILGKKHYLFYEKEPKNIIK

SEQ ID NO: 414 - protein, 1150 aa, Enterococcus faecalis; identical to SEQ ID NO: 183

SEQ ID NO: 415 - protein, 1150 aa, Enterococcus faecalis; identical to SEQ ID NO: 184

SEQ ID NO: 416 - protein, 1340 aa, Enterococcus faecium
MKKEYTIGLDIGTNSVGWSVLTDDYRLVSKKMKVAGNTEKSSTKKNFWGVRLFDEGQTAEARRSKRTARRRLARRRQRILELQKIFAPEILKIDEHFFARLNESFLVLDEKKQSRHPVFATIKQEKSYHQTYPTIYHLRQALADSSEKADIRLVYLAMAHLLKYRGHFLIEGELNTENSSVTETFRQFLSTYNQQFSEADDKQTEKLDEAVDCSFVFTEKMSKTKKAETLLKYFPHEKSNGYLSQFIKLMVGNQGNFKNVFGLEEEAKLQFSKETYEEDLEELLEKIGDDYIDLFVQAKNVYDAVLLSEILSDSTKNTRAKLSAGMIRRYDAHKEDLVLLKRFVKENLPKKYRAFFGDNSVNGYAGYIEGHATQEDFYKFVKKELTGIRGSEVFLTKIEQENFLRKQRTFDNGVIPHQIHLTELRAIIANQKKHYPFLKEEQEKLESLLTFKIPYYVGPLAKKQENSPFAWLIRKSEEKIKPWNLPEIVDMEGSAVRFIERMNNTDMYIPHNKVLPKNSLLYQKFSIYNELTKVRYQDERGQMNYFSSIEKKEIFHELFEKNRKVTKKDLQEFLYLKYDIKHAELSGIEKAFNASYTTYHDFLTMSENKREMKQWLEDPELASMFEEIIKTLTVFEDREMIKTRLSHHEATLGKHIIKKLTKKHYTGWGRLSKELIQGIRDKQSNKTILDYLINDDDFPHHRNRNFMQLINDDSLSFKKEIKKAQMITDTENLEEIVKELTGSPAIKKGILQSLKIVDEIVGIMGYEPANIVVEMARENQTTGRGLKSSRPRLKALEESLKDFGSQLLKEYPTDNSSLQKDRLYLYYLQNGRDMYTGAPLDIHRLSDYDIDHIIPRSFTTDNSIDNKVLVSSKENRLKKDDVPSEKVVKKMRSFWYDLYSSKLISKRKLDNLTKIKLTEEDKAGFIKRQLVETRQITKHVAGILHHRFNKAEDTNEPIRKVRIITLKSALVSQFRNRFGIYKVREINEYHHAHDAYLNGVVALALLKKYPQLAPEFVYGEYLKFNAHKANKATVKKEFYSNIMKFFESDTPVCDENGEIFWDKSKSIAQVKKVINHHHMNIVKKTEIQKGGFSKETVEPKKDSSKLLPRKNNWDPAKYGGLGSPNVAYTVAFTYEKGKARKRTNALEGITIMEREAFEQSPVLFLKNKGYEQAEIEMKLPKYALFELENGRKRMVASNKEAQKANSFLLPEHLVTLLYHAKQYDEISHKESFDYVNEHHKEFSEVFARVLEFAGKYTLAEKNIEKLEKIYKENQTDDLAKLASSFVNLMQFNAMGAPADFKFFDVTIPRKRYTSLTEIWQSTIIHQSITGLYETRIRMGK

SEQ ID NO: 417 - protein, 1339 aa, Enterococcus faecium
MKKEYTIGLDIGTNSVGWSVLTDDYRLVSKKMKVAGNTEKSSTKKNFWGVRLFDEGQTAEARRSKRTARRRLARRRQRILELQKIFAPEILKIDEHFFARLNESFLVLDEKKQSRHPVFATIKQEKSYHQTYPTIYHLRQALADSSEKADIRLVYLAMAHLLKYRGHFLIEGELNTENSSVTETFRQFLSTYNQQFSEADDKQTEKLDEAVDCSFVFTEKMSKTKKAETLLKYFPHEKSNGYLSQFIKLMVGNQGNFKNVFGLEEAKLQFSKETYEEDLEELLEKIGDDYIDLFVQAKNVYDAVLLSEILSDSTKNTRAKLSAGMIRRYDAHKEDLVLLKRFVKENLPKKYRAFFGDNSVNGYAGYIEGHATQEDFYKFVKKELTGIRGSEVFLTKIEQENFLRKQRTFDNGVIPHQIHLTELRAIIANQKKHYPFLKEEQEKLESLLTFKIPYYVGPLAKKQENSPFAWLIRKSEEKIKPWNLPEIVDMEGSAVRFIERMINTDMYMPHNKVLPKNSLLYQKFSIYNELTKVRYQDERGQMNYFSSIEKKEIFHELFEKNRKVTKKDLQEFLYLKYDIKHAELSGIEKAFNASYTTYHDFLTMSENKREMKQWLEDPELASMFEEIIKTLTVFEDREMIKTRLSHHEATLGKHIIKKLTKKHYTGWGRLSKELIQGIRDKQSNKTILDYLINDDDFPHHRNRNFMQLINDDSLSFKKEIKKAQMITDTENLEEIVKELTGSPAIKKGILQSLKIVDEIVGIMGYEPANIVVEMARENQTTGRGLKSSRPRLKALEESLKDFGSQLLKEYPTDNSSLQKDRLYLYYLQNGRDMYTGAPLDIHRLSDYDIDHIIPRSFTTDNSIDNKVLVSSKENRLKKDDVPSEKVVKKMRSFWYDLYSSKLISKRKLDNLTKIKLTEEDKAGFIKRQLVETRQITKHVAGILHHRFNKAEDTNEPIRKVRIITLKSALVSQFRNRFGIYKVREINEYHHAHDAYLNGVVALALLKKYPQLAPEFVYGEYLKFNAHKANKATVKKEFYSNIMKFFESDTPVCDENGEIFWDKSKSIAQVKKVINHHHMNIVKKTEIQKGGFSKETVEPKKDSSKLLPRKNNWDPAKYGGLGSPNVAYTVAFTYEKGKARKRTNALEGITIMEREAFEQSPVLFLKNKGYEQAEIEMKLPKYALFELENGRKRMVASNKEAQKANSFLLPEHLVTLLYHAKQYDEISHKESFDYVNEHHKEFSEVFARVLEFAGKYTLAEKNIEKLEKIYKENQTDDLAKLASSFVNLMQFNAMGAPADFKFFDVTIPRKRYTSLTEIWQSTIIHQSITGLYETRIRMGK

SEQ ID NO: 418 - protein, 1340 aa, Enterococcus faecium
MKKEYTIGLDIGTNSVGWSVLTDDYRLVSKKMKVAGNTEKSSTKKNFWGVRLFDEGQTAEARRSKRTARRRLARRRQRILELQKIFAPEILKIDEHFFARLNESFLVLDEKKQSRHPVFATIKQEKSYHQTYPTIYHLRQALADSSEKADIRLVYLAMAHLLKYRGHFLIEGELNTENSSVTETFRQFLSTYNQQFSEADDKQTEKLDEAVDCSFVFTEKMSKTKKAETLLKYFPHEKSNGYLSQFIKLMVGNQGNFKNVFGLEEEAKLQFSKETYEEDLEELLEKIGDDYIDLFVQAKNVYDAVLLSEILSDSTKNTRAKLSAGMIRRYDAHKEDLVLLKRFVKENLPKKYRAFFGDNSVNGYAGYIEGHATQEDFYKFVKKELTGIRGSEVFLTKIEQENFLRKQRTFDNGVIPHQIHLTELRAIIANQKKHYPFLKEEQEKLESLLTFKIPYYVGPLAKKQENSPFAWLIRKSEEKIKPWNLPEIVDMEGSAVRFIERMINTDMYIPHNKVLPKNSLLYQKFSIYNELTKVRYQDERGQMNYFSSIEKKEIFHELFEKNRKVTKKDLQEFLYLKYDIKHAELSGIEKAFNASYTTYHDFLTMSENKREMKQWLEDPELASMFEEIIKTLTVFEDREMIKTRLSHHEATLGKHIIKKLTKKHYTGWGRLSKELIQGIRDKQSNKTILDYLINDDDFPHHRNRNFMQLINDDSLSFKKEIKKAQMITDTENLEEIVKELTGSPAIKKGILQSLKIVDEIVGIMGYEPANIVVEMARENQTTGRGLKSSRPRLKALEESLKDFGSQLLKEYPTDNSSLQKDRLYLYYLQNGRDMYTGAPLDIHRLSDYDIDHIIPRSFTTDNSIDNKVLVSSKENRLKKDDVPSEKVVKKMRSFWYDLYSSKLISKRKLDNLTKIKLTEEDKAGFIKRQLVETRQITKHVAGILHHRFNKAEDTNEPIRKVRIITLKSALVSQFRNRFGIYKVREINEYHHAHDAYLNGVVALALLKKYPQLAPEFVYGEYLKFNAHKANKATVKKEFYSNIMKFFESDTPVCDENGEIFWDKSKSIAQVKKVINHHHMNIVKKTEIQKGGFSKETVEPKKDSSKLLPRKNNWDPAKYGGLGSPNVAYTVAFTYEKGKARKRTNALEGITIMEREAFEQSPVLFLKNKGYEQAEIEMKLPKYALFELENGRKRMVASNKEAQKANSFLLPEHLVTLLYHAKQYDEISHKESFDYVNEHHKEFSEVFARVLEFAGKYTLAEKNIEKLEKIYKENQTDDLAKLASSFVNLMQFNAMGAPADFKFFDVTIPRKRYTSLTEIWQSTIIHQSITGLYETRIRMGK

SEQ ID NO: 419 - protein, 1340 aa, Enterococcus faecium
MKKEYTIGLDIGTNSVGWSVLTDDYRLVSKKMKVAGNTEKSSTKKNFWGVRLFDEGQTAEARRSKRTARRRLARRRQRILELQKIFAPEILKIDEHFFARLNESFLVLDEKKQSRHPVFATIKQEKSYHQTYPTIYHLRQALADSSEKADIRLVYLAMAHLLKYRGHFLIEGELNTENSSVTETFRQFLSTYNQQFSEADDKQTEKLDEAVDCSFVFTEKMSKTKKAETLLKYFPHEKSNGYLSQFIKLMVGNQGNFKNVFGLEEEAKLQFSKETYEEDLEELLEKIGDDYIDLFVQAKNVYDAVLLSEILSDSTKNTRAKLSAGMIRRYDAHKEDLVLLKRFVKENLPKKYRAFFGDNSVNGYAGYIEGHATQEDFYKFVKKELTGIRGSEVFLTKIEQENFLRKQRTFDNGVIPHQIHLTELRAIIANQKKHYPFLKEEQEKLESLLTFKIPYYVGPLAKKQENSPFAWLIRKSEEKIKPWNLPEIVDMEGSAVRFIERMINTDMYMPHNKVLPKNSLLYQKFSIYNELTKVRYQDERGQMNYFSSIEKKEIFHELFEKNRKVTKKDLQEFLYLKYDIKHAELSGIEKAFNASYTTYHDFLTMSENKREMKQWLEDPELASMFEEIIKTLTVFEDREMIKTRLSHHEATLGKHIIKKLTKKHYTGWGRLSKELIQGIRDKQSNKTILDYLINDDDFPHHRNRNFMQLINDDSLSFKKEIKKAQMITDTENLEEIVKELTGSPAIKKGILQSLKIVDEIVGIMGYEPANIVVEMARENQTTGRGLKSSRPRLKALEESLKDFGSQLLKEYPTDNSSLQKDRLYLYYLQNGRDMYTGAPLDIHRLSDYDIDHIIPRSFTTDNSIDNKVLVSSKENRLKKDDVPSEKVVKKMRSFWYDLYSSKLISKRKLDNLTKIKLTEEDKAGFIKRQLVETRQITKHVAGILHHRFNKAEDTNEPIRKVRIITLKSALVSQFRNRFGIYKVREINEYHHAHDAYLNGVVALALLKKYPQLAPEFVYGEYLKFNAHKANKATVKKEFYSNIMKFFESDTPVCDENGEIFWDKSKSIAQVKKVINHHHMNIVKKTEIQKGGFSKETVEPKKDSSKLLPRKNNWDPAKYGGLGSPNVAYTVAFTYEKGKARKRTNALEGITIMEREAFEQSPVLFLKNKGYEQAEIEMKLPKYALFELENGRKRMVASNKEAQKANSFLLPEHLVTLLYHAKQYDEISHKESFDYVNEHHKEFSEVFARVLEFAGKYTLAEKNIEKLEKIYKENQTDDLAKLASSFVNLMQFNAMGAPADFKFFDVTIPRKRYTSLTEIWQSTIIHQSITGLYETRIRMGK

SEQ ID NO: 420 - protein, 1339 aa, Enterococcus faecium
MKKEYTIGLDIGTNSVGWSVLTDDYRLVSKKMKVAGNTEKSSTKKNFWGVRLFDEGQTAEARRSKRTARRRLARRRQRILELQKIFAPEILKIDEHFFARLNESFLVLDEKKQSRHPVFATIKQEKSYHQTYPTIYHLRQALADSSEKADIRLVYLAMAHLLKYRGHFLIEGELNTENSSVTETFRQFLSTYNQQFSEADDKQTEKLDEAVDCSFVFTEKMSKTKKAETLLKYFPHEKSNGYLSQFIKLMVGNQGNFKNVFGLEEAKLQFSKETYEEDLEELLEKIGDDYIDLFVQAKNVYDAVLLSEILSDSTKNTRAKLSAGMIRRYDAHKEDLVLLKRFVKENLPKKYRAFFGDNSVNGYAGYIEGHATQEDFYKFVKKELTGIRGSEVFLTKIEQENFLRKQRTFDNGVIPHQIHLTELRAIIANQKKHYPFLKEEQEKLESLLTFKIPYYVGPLAKKQENSPFAWLIRKSEEKIKPWNLPEIVDMEGSAVRFIERMINTDMYIPHNKVLPKNSLLYQKFSIYNELTKVRYQDERGQMNYFSSIEKKEIFHELFEKNRKVTKKDLQEFLYLKYDIKHAELSGIEKAFNASYTTYHDFLTMSENKREMKQWLEDPELASMFEEIIKTLTVFEDREMIKTRLSHHEATLGKHIIKKLTKKHYTGWGRLSKELIQGIRDKQSNKTILDYLINDDDFPHHRNRNFMQLINDDSLSFKKEIKKAQMITDTENLEEIVKELTGSPAIKKGILQSLKIVDEIVGIMGYEPANIVVEMARENQTTGRGLKSSRPRLKALEESLKDFGSQLLKEYPTDNSSLQKDRLYLYYLQNGRDMYTGAPLDIHRLSDYDIDHIIPRSFTTDNSIDNKVLVSSKENRLKKDDVPSEKVVKKMRSFWYDLYSSKLISKRKLDNLTKIKLTEEDKAGFIKRQLVETRQITKHVAGILHHRFNKAEDTNEPIRKVRIITLKSALVSQFRNRFGIYKVREINEYHHAHDAYLNGVVALALLKKYPQLAPEFVYGEYLKFNAHKANKATVKKEFYSNIMKFFESDTPVCDENGEIFWDKSKSIAQVKKVINHHHMNIVKKTEIQKGGFSEETVEPKKDSSKLLPRKNNWDPAKYGGLGSPNVAYTVAFTYEKGKARKRTNALEGITIMEREAFEQSPVLFLKNKGYEQAEIEMKLPKYALFELENGRKRMVASNKEAQKANSFLLPEHLVTLLYHAKQYDEISHKESFDYVNEHHKEFSEVFARVLEFAGKYTLAEKNIEKLEKIYKENQTDDLAKLASSFVNLMQFNAMGAPADFKFFDVTIPRKRYTSLTEIWQSTIIHQSITGLYETRIRMGK

SEQ ID NO: 421 - protein, 1340 aa, Enterococcus faecium
MKKEYTIGLDIGTNSVGWSVLTDDYRLVSKKMKVAGNTEKSSTKKNFWGVRLFDEGQTAEARRSKRTARRRLARRRQRILELQKIFAPEILKIDEHFFARLNESFLVLDEKKQSRHPVFATIKQEKSYHQTYPTIYHLRQALADSSEKADIRLVYLAMAHLLKYRGHFLIEGELNTENSSVTETFRQFLSTYNQQFSEADDKQTEKLDEAVDCSFVFTEKMSKTKKAETLLKYFPHEKSNGYLSQFIKLMVGNQGNFKNVFGLEEEAKLQFSKETYEEDLEELLEKIGDDYIDLFVQAKNVYDAVLLSEILSDSTKNTRAKLSAGMIRRYDAHKEDLVLLKRFVKENLPKKYRAFFGDNSVNGYAGYIEGHATQEDFYKFVKKELTGIRGSEVFLTKIEQENFLRKQRTFDNGVIPHQIHLTELRAIIANQKKHYPFLKEEQEKLESLLTFKIPYYVGPLAKKQENSPFAWLIRKSEEKIKPWNLPEIVDMEGSAVRFIERMINTDMYIPHNKVLPKNSLLYQKFSIYNELTKVRYQDERGQMNYFSSIEKKEIFHELFEKNRKVTKKDLQEFLYLKYDIKHAELSGIEKAFNASYTTYHDFLTMSENKREMKQWLEDPELASMFEEIIKTLTVFEDREMIKTRLSHHEATLGKHIIKKLTKKHYTGWGRLSKELIQGIRDKQSNKTILDYLINDDDFPHHRNRNCMQLINDDSLSFKKEIKKAQMITDTENLEEIVKELTGSPAIKKGILQSLKIVDEIVGIMGYEPANIVVEMARENQTTGRGLKSSRPRLKALEESLKDFGSQLLKEYPTDNSSLQKDRLYLYYLQNGRDMYTGAPLDIHRLSDYDIDHIIPRSFTTDNSIDNKVLVSSKENRLKKDDVPSEKVVKKMRSFWYDLYSSKLISKRKLDNLTKIKLTEEDKAGFIKRQLVETRQITKHVAGILHHRFNKAEDTNEPIRKVRIITLKSALVSQFRNRFGIYKVREINEYHHAHDAYLNGVVALALLKKYPQLAPEFVYGEYLKFNAHKANKATVKKEFYSNIMKFFESDTPVCDENGEIFWDKSKSIAQVKKVINHHHMNIVKKTEIQKGGFSKETVEPKKDSSKLLPRKNNWDPTKYGGLGSPNVAYTVAFTYEKGKARKRTNALEGITIMEREAFEQSPVLFLKNKGYEQAEIEMKLPKYALFELENGRKRMVASNKEAQKANSFLLPEHLVTLLYHAKQYDEISHKESFDYVNEHHKEFSEVFARVLEFAGKYTLAEKNIEKLEKIYKENQTDDLAKLASSFVNLMQFNAMGAPADFKFFDVTIPRKRYTSLTEIWQSTIIHQSITGLYETRIRMGK

SEQ ID NO: 422 - protein, 892 aa, Enterococcus faecium
MTFKIPYYVGPLAKKQENSPFAWLIRKSEEKIKPWNLPEIVDMEGSAVRFIERMINTDMYMPHNKVLPKNSLLYQKFSIYNELTKVRYQDERGQMNYFSSIEKKEIFHELFEKNRKVTKKDLQEFLYLKYDIKHAELSGIEKAFNASYTTYHDFLTMSENKREMEQWLEDPELASMFEEIIKTLTVFEDREMIKTRLSHHKATLGKHIIKKLTKKHYTGWGRLSKELIQGIRDKQSNKTILDYLINDDDFPHHRNRNFMQLINDDSLSFKKEIKKAQMITDTENLEEIVKELTGSPAIKKGILQSLKIVDEIVGIMGYEPANIVVEMARENQTTGRGLKSSRPRLKALEESLKDFGSQLLKEYPTDNSSLQKDRLYLYYLQNGRDMYTGAPLDIHRLSDYDIDHIIPRSFTTDNSIDNKVLVSSKENRLKKDDVPSEKVVKKMRSFWYDLYSSKLISKRKLDNLTKIKLTEEDKAGFIKRQLVETRQITKHVAGILHHRFNKAEDTNEPIRKVRIITLKSALVSQFRNRFGIYKVREINEYHHAHDAYLNGVIALALLKKYPQLAPEFVYGEYLKFNAHKANKATVKKEFYSNIMKFFESDTPVCDENGEIFWDKSKSIAQVKKVINHHHMNIVKKTEIQKGGFSKETVEPKKDSSKLLPRKNNWDPAKYGGLGSPNVAYTVAFTYEKGKARKRTNALEGITIMEREAFEQSPVLFLKNKGYEQAEIEMKLPKYALFELENGRKRMVASNKEAQKANSFLLPEHLVTLLYHAKQYDEISHKESFDYVNEHHKEFSEVFARVLEFAGKYTLAEKNIEKLEKIYKENQTDDLAKLASSFVNLMQFNAMGAPADFKFFDVTIPRKRYTSLTEIWQSTIIHQSITGLYETRIRMGK

SEQ ID NO: 423 - protein, 1336 aa, Enterococcus hirae
MTKDYTIGLDIGTNSVGWAVLTDDYQLMKRKMSVHGNTEKKKIKKNFWGARLFDEGQTAEFRRTKRTNRRRLARRKYRLSKLQDLFAEELCKQDDCFFVRLEESFLVPEEKQYKPASIFPTLEEEKEYYQKYPTIYHLRQKLVDSTEKEDLRLVYLALAHLLKYRGHFLFEGDLDTENTSIEESFRVFLEQYSKQSDQPLIVHQPVLTILTDKLSKTKKVEEILKYYPTEKINSFFAQCLKLIVGNQANFKRIFDLEAEVKLQFSKETYEEDLESLLEKIGDEYLDIFLQAKKVHDAILLSEIISSTVKHTKAKLSSGMVERYERHKADLAKFKQFVKENVPQKATVFFKDTTKNGYAGYIKGKTTQEEFYKFVKKELSGVVGSEPFLEKIDQETFLLKQRTYTNGVIPHQVHLIELKAIIDQQKQHYPFLEEAGPKIIALFKFRIPYYVGPLAKEQEASSFAWIERKTAEKINPWNFSEVVDIEKSAMRFIQRMTKQDTYLPTEKVLPKNSLLYQKYMIFNELTKVSYKDERGVKQYFSGDEKQQIFKQLFQKERGKITVKKLQNFLYTHYHIENAQIFGIEKAFNASYSTYHDFMKLAKTNQKAMQEWLEQPEMEPIFEDIVKILTIFEDRQMIKHQLSKYQEVFGEKLLKEFARKHYTGWGRFSAKLIHGIRDRKTNKTILDYLINDDDVPANRNRNLMQLINDEHLSFKEEIAKATVFSKHKSLVDVIQDLPGSPAIKKGIWQSLKIVEELIAIIGYKPKNIVIEMARENQKTHRTSPRLKALENGLKQIGSTLLKEQPTDNKALQKERLYLYYLQNGRDMYTGEPLEIENLHQYEVDHIIPRSFIVDNSIDNKVLVASKQNQKKRDDVPKKQIVNEQRIFWNQLKEAKLISPKKYAYLTKIELTPEDKARFIQRQLVETRQITKHVANILHQSFNQEEEGTDCDGVQIITLKATLTSQFRQTFGLYKVREINPHHHAHDAYLNGFIANVLLKRYPKLAPEFVYGKYVKYSLARENKATAKKEFYSNILKFLESDEPFCDENGEIYWEKSHHLPRIKKVLSSHQVNVVKKVEQQKGGFYKETVNSKEKPDKLIERKNNWDVTKYGGFGSPVIAYAIAFVYAKGKTQKKTRAIEGITIMEQAAFEKDPTTFLKEKGFPQVTEFIKLPKYTLFEFDNGRRRFLASHKESQKGNPFILSDQLVTLLYHAQHYDKITYQESFDYVNTHLSDFSAILTEVLAFAEKYTLADKNIERIQELYEENKYGETSMIAQSFLQLLQFNAIGAPADFKFFGVTIPRKRYTSLTEIWDATIIYQSVTGLYETRIRMGDLWAGEQ

SEQ ID NO: 424 - protein, 116 aa, Enterococcus sp.
MYSIGLDLGISSVGWSVIDERTGNVIDLGVRLFSAKNSEKNLERRTNRGGRRLIRRKTNRLKDAKKILAAVGFYEDKSLKNSCPYQLRVKGLTELLSKGEIYKVTLHILKNVELVT

SEQ ID NO: 425 - protein, 1391 aa, Eubacterium sp.
MENKQYYIGLDVGTNSVGWAVTDTSYNLLRAKGKDMWGARLFDEAKTAVERRTKRTSRRRSEREKARKAMLKELFADEINKVDPNFFIRLEESKFFLDDRSENNRQRYTLFNDAKFTDKDYYEKYKTIFHLRSALINSDEKFDVRLVFLAILNLFSHRGHFLNASLKGDGEIQGVDIFYNDLYEVCEEFEIDLPQISNIDNFEKILSQKGKSRTKILEELSEELSISKKEKIKYSLLKLICGMKIKVVDIYADEDIQEDDKKKDLGFRESDYEKSSLEVKEIIGDDHFELIERAKAVHDIGLLANIIGNSKYLCEARVEAYDNHHKDLQKIKELLKKYDIKAYTDMFRKMTDKNYSAYVGSVNSNIAKERRSVDNRKIEDLYEYIKKIALKNISDDNEDKIEILKKIETGEFLKKQLTASNGVIPNQLQSRELRAILKKAENYLPFLKEKGEKNLTVSEMIIQLFEFQIPYYVGPLDKNPKKDKNANSWAVIPSGGRILPWNFEDKVDVKGSRKEFIEKMVRKCTYLSEEHTLPKQSLLYEKFMVLNEINNIKIDGEKISVEAKQKIYNDLFMKGKKVSQKAIKQELISLNIMSKDSVLSGIDTVCNAYLSSIAKFRGVFDENVNNQSTIDMIEDIIFLKTVYSDEKRFVKEEIVEKYGDEIDKDKIKRILGFKFSNWGNISKSFLELEGADVGTGEIRSIIQSLWETNFNLMELLSSRFTYMDELEKRVKKLEKPLSEWTIEDLDDMYLSSPVKRMIWQSMKIVDEIQTVIGYAPKRIFVEMTRSEGEKVRTKSRKDRLKELYSAIKEDSKQWVKELDAKDESYFRSKKMYLYYLQKGRCMYSGEVIELDKLMDDNLYDIDHIYPRSFVKDDSLDNLVLVKKEINNRKQNDPITPQIQASCQGFWKVLHEQGFISNEKYSRLTRKTQEFSDEEKLSFINRQIVETGQATKCMAQILQKSMGEDVDVVFSKARLVSEFRHKFELFKSRLINDFHHANDAYLNIVVGNSYFVKFTRNPANFIKDARKNPDNPAYKYHMDRFFERDVKSKSEVAWIGQSEGNAGTIAIVKKTMSKNSPLITKKVEEGHGSITKETIVGVKEIKFGRNKVEKADKTPKKANLQAYRPIKTSDERLCNILRYGGRTSISISGYCLVEYVKKRKTIRSLEAIPVYLGRKDSLSEEKLLNYFRYNLNDGGKDSVSDIRLCLPFISTNSLVKIDGYLYYLGGKNDDRIQLYNAYQLKMKKEEVEYIRKIEKAVSMSKFDEIDREKNPVLTEEKNIELYNKIQDKFENTVFSKRMSLVKYNKKDLSFGDFLKNKKSKFEEIDLEKQCKVLYNIIFNLSNLKEVDLSDIGGSKSTGKCRCKKNITNYKEFKLIQQSITGLYSCEKDLMTI

SEQ ID NO: 426 - protein, 1391 aa, Eubacterium yurii
MENKQYYIGLDVGTNSVGWAVTDTSYNLLRAKGKDMWGARLFEKANTAAERRTKRTSRRRSEREKARKAMLKELFADEINRVDPSFFIRLEESKFFLDDRSENNRQRYTLFNDATFTDKDYYEKYKTIFHLRSALINSDEKFDVRLVFLAILNLFSHRGHFLNASLKGDGDIQGMDVFYNDLVESCEYFEIELPRITNIDNFEKILSQKGKSRTKILEELSEELSISKKDKSKYNLIKLISGLEASVVELYNIEDIQDENKKIKIGFRESDYEESSLKVKEIIGDEYFDLVERAKSVHDMGLLSNIIGNSKYLCEARVEAYENHHKDLLKIKELLKKYDKKAYNDMFRKMTDKNYSAYVGSVNSNIAKERRSVDKRKIEDLYKYIEDTALKNIPDDNKDKIEILEKIKLGEFLKKQLTASNGVIPNQLQSRELRAILKKAENYLPFLKEKGEKNLTVSEMIIQLFEFQIPYYVGPLDKNPKKDNKANSWAKIKQGGRILPWNFEDKVDVKGSRKEFIEKMVRKCTYISDEHTLPKQSLLYEKFMVLNEINNIKIDGEKISVEAKQKIYNDLFVKGKKVSQKDIKKELISLNIMDKDSVLSGTDTVCNAYLSSIGKFTGVFKEEINKQSIVDMIEDIIFLKTVYGDEKRFVKEEIVEKYGDEIDKDKIKRILGFKFSNWGNLSKSFLELEGADVGTGEVRSIIQSLWETNFNLMELLSSRFTYMDELEKRVKKLEKPLSEWTIEDLDDMYLSSPVKRMIWQSMKIVDEIQTVIGYAPKRIFVEMTRSEGEKVRTKSRKDRLKELYNGIKEDSKQWVKELDSKDESYFRSKKMYLYYLQKGRCMYSGEVIELDKLMDDNLYDIDHIYPRSFVKDDSLDNLVLVKKEINNRKQNDPITPQIQASCQGFWKILHDQGFMSNEKYSRLTRKTQEFSDEEKLSFINRQIVETGQATKCMAQILQKSMGEDVDVVFSKARLVSEFRHKFELFKSRLINDFHHANDAYLNIVVGNSYFVKFTRNPANFIKDARKNPDNPVYKYHMDRFFERDVKSKSEVAWIGQSEGNSGTIVIVKKTMAKNSPLITKKVEEGHGSITKETIVGVKEIKFGRNKVEKADKTPKKPNLQAYRPIKTSDERLCNILRYGGRTSISISGYCLVEYVKKRKTIRSLEAIPVYLGRKDSLSEEKLLNYFRYNLNDGGKDSVSDIRLCLPFISTNSLVKIDGYLYYLGGKNDDRIQLYNAYQLKMKKEEVEYIRKIEKAVSMSKFDEIDREKNPVLTEEKNIELYNKIQDKFENTVFSKRMSLVKYNKKDLSFGDFLKNKKSKFEEIDLEKQCKVLYNIIFNLSNLKEVDLSDIGGSKSTGKCRCKKNITNYKEFKLIQQSITGLYSCEKDLMTI

SEQ ID NO: 427 - protein, 1142 aa, Facklamia hominis
MYSVGLDIGIASCGYSIINDVNGNIVELGTLLFKSRNSDNNEERRTNRGSRRLINRRRTRLDDGKKLLAEKGFKQDSKLKHVCPYELRVKGLHEKLTQGEIYKVVLHILKKRGISYLDESDENSSGIDGASYKDQVNLNLNLQKELTPGQIQLKRLKENGRIKSGVTFENGYQLNVFSVSAYANELNKILTKQSEYYSEIDQIWIDRFTKNGYRKEAGLVYRKRPYYDGPGNEKNNSIYGRWANFKEDGHPKENIFDQLIGLDSVDSTQVRASASTLTAQKYNLLNDLNNLTIIEDDRKFTTDEKVSIINYLMTQDITRFGPKELAKFYQLEVDQIRGWRIDNKGNPEIHSLKVYRDWKKIFNTSSIDLTSIQTWVVDELANVITLNTEIPSTLATLKIKIPDIDQQILNFVENNFYELKKKTSKNSWHSFSLKTLNILIPELLNTSEEQNTILERLNLKFDLKNKYAEKNQIPVKELLEQIYNPTVTKSVHQSIKLFNEIIEKYGKNNISYVTIEMPRDKNDQDQKDTIKRINKLNSERKNDSEKYFLERSGWDTIRFESALKKPRFAEKLLFYYEQKGKCAYSGQDILAESLLNESCEVDHIIPLSISFDDSIHNKVLVTASSNQEKGQRTPYMAFIDGAKLGQSWDDFVAWVNSCGFHRKKVQNLLYEENIFNPDVQRGFVSRNLNDTRYASRIVLNAIQSFFYKQKDLTKVKVVNGSFTHTLRKKWGSSLDKNRDTYHHHAVDATLCAVTPFINIVKYEFFEEDGIKYMVDLTTGEKVAYSDYKKMKFYDKRAYVPIWDGFIKQLTPANLYPKIKFSHQVDSKWNRKISDATIYSTRKIVETKINKKGVAKETVKDIVIDKIKDIYTPEGWRKFKEKQDKLLMKNFDEKTYNKLIKIAKEYPEKKEVQTSNGKVSLVEVSPFKMYCEEQNVPAIRKYSKKGNGPYIRSLKFYDKELGKHINITKDSYGNDIERTIRNKKIILKNQNSWRTDVYYNSVNNCYELLGIKYCHLKFYRGKYGIPKSIYDELKKEDEISSESVFKFSLYRHDRVRFEKDGEYIEALFGSKNESNKNYLELSPIDKNKWLSKENVKFFGEVAASGRFIKGLKPGIKVIKQSTDYMGHVYAIHQEKLKFVLSDA

SEQ ID NO: 428 - protein, 1347 aa, Finegoldia magna
MKSEKKYYIGLDVGTNSVGWAVTDEFYNILRAKGKDLWGVRLFEKAKTAADTRTFRSGRRRNDRKGMRLQILREIFEDEIKKVDKDFYDRLDESKFWAEDKKVSGKYSLFNDKNFSDKQYFEKFPTIFHLRKYLMEEHGKVDIRYYFLAINQMMKRRGHFLIDGQISHVTDDKPLKEQLILLINDLLKIELEEELMDSIFEILADVNEKRTDKKNNLKELIKGQDFNKQEGNILNSIFESIVTGKAKIKNIISDEDILEKIKEDNKEDFVLTGDSYEENLQYFEEVLQENITLFNTLKSTYDFVILQSILKGKSTLSDAQVERYDEHKKDLEILKKVIKKYDEDGKLFKQVFKEDNGNGYVSYIGYYLNKNKKITAKKKISNIEFTKYVKGILEKQCDCEDEAVKYLLGKIEQENFLLKQISSINSVIPHQIHLFELDKILENLAKNYPSFNNKKEEFTKIEKIRKTFTFRIPYYVGPLNDYHKNNGGNAWIFRNKGEKIRPWNFEKIVDLHKSEEEFIKRMLNQCTYLPEETVLPKSSILYSEYMVLNELNNLRIKGKPLDTDVKLKLIEELFKKKTKVTLKSIRDYMIRNNFADKEDFDNSEKNLEIVSNMKSYIDFNNILGDKFELEMVEDLIEKITIHTGNKTLLKKYIEETYPDLSSSQIQKIINLKYKDWGRLSRKLLDGIKGRNKTDDVNTVINFMRNSSDNLMQIIEGKNYSFNEYIDNLRKKYIPQEISYEVVENLYVSPSVKKMIWQVIRVTEEITKVMGYDPDKIFIEMAKSEEEKKTTISRKNKLLDLYKAIKKDERDSQYEKLLTGLNKLDESELRSKKLYLYYTQMGRDMYTGEKIDLDKLFDSTHYDKDHIIPQSMKKDDSIINNLVLVNKNANQTTKGNIYPVPSSIRNNPDIYNYWKYLMEKEFISKEKYNRLIRNTPLTNEELGVFINRQLVETRQSTKAIKELFEKFYQKSKIIPVKASLASDLRKDMNTLKSREVNDLHHAHDAFLNIVAGDVWNREFTSNPINYVNENREGDKVKYSLSKYFTRPRKSKGKVIWTPEKGRKLIVDTLNKPSVLISNESHVKKGELFNATISGKKDYKKGKIYLPLKKDDRLKDVSKYGGYKAINGAFFFLVEHTKSKKRIRSIELFPLHLLSKFYEDKNTVLDYAINVLQLQDPKIIIDKINYRTEIIIDNFSYLISTKSNDGSITVKPNEQMYWRVDEISNLKKIENKYKKDAILTEEDRKIMESYIDKIYQQFKAGKYKNRRTTDTIIEKYEIIDLDTLDNKQLYQLLVAFISLSYKTSNNAVDFTVIGLGTECGKPRITNLPDNTYLVYKSITGIYEKRIRIK

SEQ ID NO: 429 - protein, 1348 aa, Finegoldia magna; identical to SEQ ID NO: 227

SEQ ID NO: 430 - protein, 1516 aa, Flavobacteriaceae bacterium
MLKQQKDKIIGMNKKILGLDLGTNSIGWALVKQDLENKYGEIIGCGSRIIPMSQDVLGKFDAGISISQTAERTNYRSVRKLIQRNTLRRERLHRVLHQLDFLPKHYNDSIDFEKKLGQFKTDKETKLNYFVNQHGKHEFLFKDSFNEMVKEFKEEQPELFYIKNNGKETKIPYDWTIYYLRKKALSKKISKEELSWLVLNFNQKRGYYQLRGEIDEEKEKNKRYEKLYVSEVVKTNNTIKKTGEYLYDIYFDNGWKYEKQTTKPQDWLHKHKEFIITTTTLKNGETKRTFKTVDSEKDWIAIKSKTEQDIKESNKTVGAFIYDTLLKNPTQKIRGSLVKTIERKFYREEFEKILKEQIKHRPEINVNTAIGKENYTKCVTELYPRNEAHANNILTNDFNYLFTKDILFYQRPLKSKKSEIANCQYEYRTYIKKKEKTGKEERVKQPLKATPKSHPLFQEFRLWQFIHNLKIYIRETTVGNKPLFDVDITDTFFTSENDWATLFEYLNNKKEIEQKHVLEYLVSKKIISKSEKTDYRWNYVEDKKYPGNETRVDFINRLKKVENLNVDEFLTSELEFKLWHIIYSVTDKNEYEKALENFAIRQNIDKDSFVNSFKKFPPFKSDYGAYSTKAIKKLLPLMRLGKFWDGSEIPKVVVEKITDIKTRLTSVNYDESLFKKDEKKILETIVDDITPKQLLKSFVKLKGKNHLAGLNTYQACYLVYERHSESSDITQWENPDDIDSFLNHFKQHSLRNPIVEQVVTETLRTVRDIWKYYGNGSPNYFNEIHIELGREMKNPADKRKQMSAKINENENTNQRIKGILQELMNDGVQDIKPYSPSQQEILKIYEEGISQNPNVDYSKVSEDEITKIKKSNNPTLKEIQRYKLWLEQKYISPYTGKPIPLSELFTPAYQIEHIIPQSRYFDNSLSNKIICESEVNEDKSNKTAYEYLKTNGGSIVHGHHLLSLKEYEDHCQHYFKKNRTKLKNLLSEEIPEGFINRQLNDSRYISKLIKGLLSNIVREENEQEATSKNIVPVTGSITSKLKQDWGLNDKWNEIIAPRFKRLNKMTNSNDFGYFDEKINTFRIQVPDAISRGFNKKRIDHRHHTLDALVIACCTKKHIQYLNSLNNEIIKHELKPSILIKNAQGDYTKHFMLPWNNFPIDCKNAIENTIVSFKQNLRVINKTSNKYQSYKDENGNLRLGKDGKPKKGLTKQTKGNNWAVRKAMHEDTFYGEIVDGENKGKLKIKTLLDTSFDVKKIEDKVLDKSIRTILINYLKQDKYKNLSKPHEEAFSPNGIIEMNKNIISLNNNIPHKPIKRVTLKHEKGKKFSIKTLLDKKTKFAKSATGTNVFFCIYKNINGKIKYHTPSFEEIIEIQKQEFEIKYKSKLNVPETLFDKKESFELLFYLQPNDLVYLPNDEELKNRQLIDFNNLNKKQIKRIYKFTDGSGTTANFIPYQVAKVIFNLNKKEQAKSSFKYPIQNEFGVGSPQSKNQKSIEGILIKERCIKLKIDRLGNISKA

SEQ ID NO: 431 - protein, 1629 aa, Francisella cf.
MNFKILPIAIDLGVKNTGVFSAFYQKGTSLERLDNKNGKVYELSKDSYTLLMNNRTARRHQRRGIDRKQLVKRLFKLIWTEQLNLEWDKDTQQAISFLFNRRGFSFITDGYSPEYLNIVPEQVKAILMDIFDDYNGEDDLDSYLKLATEQESKISEIYNKLMQKILEFKLRKLCTDIKDDKVSTKTLKEITSYEFELLADYLANYSEILKTQKFSYTDKQGNLKELSYYHHDKYNIQEFLKRHATINIQILDTLLTDDLDIWNFNFEKFDFDKNEEKLQNQEDKDHIQAHLHHFVFAVNKIKSEMASGGRHRSQYFQEITNVLDENNHQEGYLKNFCENLHNKKYSNLSVKNLVNLIGNLSNLELKPLRKYFNDKIHAKADHWDEQKFTETYCHWILGEWRVGVKDQDKKDGAKYSYKDLCNELKQKVTKAGLVDFLLELDPCRTIPPYLDNNNRKPPKCQSLILNPKFLDNQYPNWQQYLQELKKLQSIQNYLESFETDLKVLKSSKDQPYFVEYRSSNQQIASGQRDYKDLDARILQFIFDRVKASDELLLNEIYFQAKKLKQKASSELEKLESSKKLDEVIANSQLSQILKSQHTNGIFEQGTFLHLVCKYYKQRQRARDSRLYIMPEYRYDKKLHKYNNTGRFDDDNQLLTYCNHKPRQKRYQLLNDLAGVLQVSPNFLKDKIGSDDDLFISKWLVEHIRGFKKACEDSLKIQKDNRGLLNHKINIARNTKGKCEKEIFNLICKIEGSEDKKGNYKHGLAYELGVLLFGEPNEASKPEFDRKIKKFNSIYSFAQIQQIAFAERKGNANTCAVCSADNAHRMQQIKITEPVEDNKDKIILSAKAQRLPAITTRIVDGAVKKMATILAKNIVDDNWQNIKQVLSAKHQLHIPIITESNAFEFEPALADVKGKSLKDRRKKALERISPENIFKDKNNRIKEFAKGISAYSGANLTDGDFDGAKEELDHIIPRSHKKYGTLNDEANLICVTRGDNKNKGNRIFCLRDLANNYKLKQFETTDDLEIEKKIADTIWDANKKDFKFGNYRSFINLTPQEQKAFRHALFLADENPIKQAVIRAINNRNRTFVNGTQRYFAEVLANNIYLRAKKENLNTDKISFDYFGIPTIGNGRGIAEIRQLYEKVDSDIQAYAKGDKPQASYSHLIDAMLAFCIAADEHRNDGSIGLEIDKNYSLYPLDKNTGEVFTKDIFSQIKITDNEFSDKKLVRKKATEGFNTHRQMTRDGIYAENYLPILIHKELDEVRKGYTWKNSEEIKIFKGKKYDIQQLNNLLYCLKFVDKPISIDIQISTLEELRNILTTNNIAATAEYYYINLKTQKLHEYYIENYNTALGYKKYTKEMEFLRSLAYRSERVKIKSIDDVKQVLDKDSNFIIGKITLPFKKEWQRLYREWQNITIKDDYEFLKSFFNVKSITKLHKKVRKDFSLPISTNEGKFLVKRKTWDNNFIYQILNDSDSRVDGTKPFIPAFDISKNEIVEAIIDSFTSKNIFWLPKNIELQKVDNKNIFAIDTSKWFEVETPSDLRDIGVATIQYKIDNNSRPKVRVKLDYVIDDDSKINYFTNHSLLKSRYPDKVLEILKQSTIIEFESSGFNKTIKEMLGMTLAGIYNETSNN

SEQ ID NO: 432 - protein, 1646 aa, Francisella cf.
MNIKILPIAIDLGAKNTGVFSAFYQKGTSLESLDNKNGKVYELSKDSYTLLMNNRTARRHQRRGIDRKQLVKRLFKLIWTKQLNLEWNKDTQQTISFLLNRRGFSFITDGYSPEYLNIAPEAVKAILMSILDDYNGEDDLDSYLQSATENDSKIDELYNKLLQKALEFKLRKLCIDIKEDKVTTKTLKELSNTEFKLLANYLVDYDRILRTQKFSYTDKQGNLRELNYYHHDKYNIQEFLKRNIIINDVILEKLTDDLDIWNLNFDKFDFEKNLEKLENQEDKDYLQTHLHHFVFAVNKIKSEMASGGRHRSQYFQEITNVLVENNHQEGYLKNFCENLHNKKYSNLSVKNLVNLIGNLSNLELKPLRKYFNDKIHAKADYWDEQKFAETYSDWILGEWRVGAKDKDKKDGAKYSYKNLCDELKQKVGINQDGIINQTKSDFVDFLLELDPCRTIPPYLDNNNRKPPKCQSLILNPKFLDNKYPNWQQYLQELKKLQTVQNYLGNFEIDLKDLKSSKEQPYFVKYKSLNQQIASGQRDYKDLDARVLQFIFDRVKASDELLLNEIYSHAKKLKQNTSSELEKLELCKKLDEVIANSQLSQILKSQHVNGIFEQGTFLHLVCKYYKQRQRARDSRLYIMPEYRYDKKLDKYNNTGRFDDDNQLLTYCNHKPRQKRYQLLNDLAGVLQVSPNFLKDKIGSDDDLFISKWLVEHIRGFKKACEDSLKIQKDNRGLLNHKINIARNTKGKCEKEIFNLICKIEGSEDKKGNYKHGLAYELGVLLFGEPNQASKLEFDRKIKKFNSIYSFAQIQQIAFAERKGNANTCAVCSADNAHRMQQIKVAKPVEGNKDNIILSAKAQRLPAIPTRIVDGAVKKIATILARNIVDDNWDNIKQALSNNQQLHVPIITESNAFEFEPALADIKGKSLKDKRKKALERIDPENVFKDKNNRIKEFAKGISAYSDANLANGDFDGAKEELDHIIPRSHKKYGTLNDEANLICVTREDNQNRGNKAVFLYDLKPNYKLKQFNTTDDLEIEKKIADTIWDASKQDFKFGNYRSFINLTPQEQIAFRHALFLADKNPIKKAVIRAIDNRNRTFVNGTQRYFAEVLANNIYLRAKKENLATNRITFDYFGIETTNSNGRGIADVRKLYEKVDSDIQAYAKGDKPQDSYSHLIDAMIAFCVAADEHKNEGSIGLKMGNQYGLFPTPDKYDENTGEIISWHNDDIFRKIKVSDNQFSDKKLVRKKATEGFNTHRQMTRDGIYGESYLPILIHKNLNEVRKGYNWENSEEIKIFKGKKYDIQQLNNLVYCLKFVDKPISIDIQITTLEELRNILETNNISTTAEYYYINLKTQKLHEYYIENYNTALGYKKYTKEMEFLRSLAYRTERVKIKSIDDVSMILAKDSNFKAGKIELPFKTEWQRLYLEWQNTTIKDNHEFLKSYFSVKNATKQHKKVRKDFSLPISTNEGKLLVKRKTWDNNFIYQILNDSDSRADGTKPFIPAFDISKNEIVETIIKSFTSKNIFWLPKNIELQKVDNKSIFAIDTSRWFEVETPKDLIEIGVSTIQYKIDNNSRPKVRVKLDYVMDDDSKINYFMNHSLLKSRYPDKVLEILKQSTIIEFESSGFNKTIKEMLGMTLAGIYNETSNN

SEQ ID NO: 433 - protein, 1629 aa, Francisella novicida
MNFKILPIAIDLGVKNTGVFSAFYQKGTSLERLDNKNGKVYELSKDSYTLLMNNRTARRHQRRGIDRKQLVKKLFKLIWTEQLNLEWDKDTQQAISFLFNRRGFSFITDGYSPEYLNIVPEQVKAILMDIFDDYNGEDDLDSYLKLATEQESKISEIYNKLMQKILEFKLRKLCTDIKDDKVSTKTLKEITSYEFELLADYLANYSESLKTQKFSYTDKQGNLKELSYYHHDKYNIQEFLKRHATINDEILDTLLTDDLDIWNFNFEKFDFDKNEEKLQNQEDKDHTQAHLHHFVFAVNKIKSEMASGGRHRGQYFQEITNVLDENNHQEGYLKNFCENLHNKKYSNLSVKNLVNLIGNLSNLELKPLRKYFNDKIHAKADHWDEQKFTETYCHWILGEWRVGLKDQDKKEGAKYSYKDLCNELKQKVTNAGLIDFLLELDPCRTIPPYLDNNNRKPPKCQSLILNPKFLDNQYPNWQQYLQELKKLQIIQDYLESFETDLKVLKSSKDQPYFVEYKSSNQQIASGQRDYKDLDARILQFIFDRVKASDELLLNEIYFQAKKLKQKASSELEKLESSKKLDEVIANSQLSKILKSQHTNGIFEQGTFLHLVCKYYKQRQRARDSRLYIMPEYRYDKKLDKYNNTGRFDDDNQLLTYCNHKPRQKRYQLLNDLAGVLQVSPNFLKDKIGSDDDLFISKWLVEHIRGFKKACEDSLKIQKDNRGLLNHKINIARNTKGKCEKEIFNLICKIEGSEDKKGNYKHGLAYELGVLLFGEPNEASKPEFDRKIKKFNSIYSFAQIQQIAFAERKGNANTCAVCSADNAHRMQQIKITEPVEDNKDKIILSAKAQRLPAIPTRIVDGAVKKMATILAKNIVDDNWQNIKQVLSAKHQLHIPIITESNAFEFEPALADVKGKSLKDRRKKALERISPENIFKDKNNRIKEFAKGISAYSGANLTDGDFDGAKEELDHIIPRSHKKYGTLNDEANLICVTRDDNKNKGNRIFCLHDLANNYKLKQFETTDDLEIEKKIADTIWDASKKDFKFGNYRSFINLTPQEQKAFRHALFLADENPIKQAVIRAINNRNRTFVNGTQRYFAEVLANNIYLRAKKENLNTDKISFDYFGIPTIGNGRGIAEIRQLYEKVDSDIQVYAKGDKPQASYSHLIDAMLAFCIAADEHRNDGSIGLEIDKNYSLYPLDKNTGEVFTKDIFSQIKITDNEFSDKKLVRKKATEGFNTHRQMTRDGIYAENYLPILIHKELDEVRKGYTWKNSEEIKIFKGKKYDIQQLNNLLYCLKFVDKPISIDIQISTLEELRNILTTNNIAATAEYYYINLKTQKLHEYYIENYNTALGYKKYTKEMEFLRSLAYRSERVKIKSIDDVKQVLDKDSNFIIGKITLPFKKEWQRLYREWQNTTIKDDYEFLKSFFNVKSITKLHKKVRKDFSLPISTNEGKFLVKRKTWDNNFIYQILNDSDSRVDGTKPFIPAFDISKNEIVEAIIDSFTSKNIFWLPKNIELQKVDNKNIFAIDTSKWFEVETPSDLRDIGVATIQYKIDNNSRPKVRVKLDYVIDDDSKINYFTNHSLLKSRYPDKVLEILKQSTIIEFESSGFNKTIKEMLGMTLAGIYNETSNN

SEQ ID NO: 434 - protein, 1629 aa, Francisella novicida
MNFKILPIAIDLGVKNTGVFSAFYQKGTSLERLDNKNGKVYELSKDSYTLLMNNRTARRHQRRGIDRKQLVKRLFKLIWTEQLNLEWDKDTQQAISFLFNRRGFSFITDGYSPEYLNIVPEQVKAILMDIFDDYNGEDDLDSYLKLATEQESKISEIYNKLMQKILEFKLMKLCTDIKDDKVSTKTLKEITSYEFELLADYLANYSESLKTQKFSYTDKQGNLKELSYYHHDKYNIQEFLKRHATINDRILDTLLTDDLDIWNFNFEKFDFDKNEEKLQNQEDKDHIQAHLHHFVFAVNKIKSEMASGGRHRSQYFQEITNVLDENNHQEGYLKNFCENLHNKKYSNLSVKNLVNLIGNLSNLELKPLRKYFNDKIHAKADHWDEQKFTETYCHWILGEWRVGVKDQDKKDGAKYSYKDLCNELKQKVTKAGLVDFLLELDPCRTIPPYLDNNNRKPPKCQSLILNPKFLDNQYPNWQQYLQELKKLQSIQNYLDSFETDLKVLKSSKDQPYFVEYKSSNQQIASGQRDYKDLDARILQFIFDRVKASDELLLNEIYFQAKKLKQKASSELEKLESSKKLDEVIANSQLSQILKSQHTNGIFEQGTFLHLVCKYYKQRQRARDSRLYIMPEYRYDKKLHKYNNTGRFDDDNQLLTYCNHKPRQKRYQLLNDLAGVLQVSPNFLKDKIGSDDDLFISKWLVEHIRGFKKACEDSLKIQKDNRGLLNHKINIARNTKGKCEKEIFNLICKIEGSEDKKGNYKHGLAYELGVLLFGEPNEASKPEFDRKIKKFNSIYSFAQIQQIAFAERKGNANTCAVCSADNAHRMQQIKITEPVEDNKDKIILSAKAQRLPAIPTRIVDGAVKKMATILAKNIVDDNWQNIKQVLSAKHQLHIPIITESNAFEFEPALADVKGKSLKDRRKKALERISPENIFKDKNNRIKEFAKGISAYSGANLTDGDFDGAKEELDHIIPRSHKKYGTLNDEANLICVTRGDNKNKGNRIFCLRDLADNYKLKQFETTDDLEIEKKIADTIWDANKKDFKFGNYRSFINLTPQEQKAFRHALFLADENPIKQAVIRAINNRNRTFVNGTQRYFAEVLANNIYLRAKKENLNTDKISFDYFGIPTIGNGRGIAEIRQLYEKVDSDIQAYAKGDKPQASYSHLIDAMLAFCIAADEHRNDGSIGLEIDKNYSLYPLDKNTGEVFTKDIFSQIKITDNEFSDKKLVRKKAIEGFNTHRQMTRDGIYAENYLPILIHKELNEVRKGYTWKNSEEIKIFKGKKYDIQQLNNLVYCLKFVDKPISIDIQISTLEELRNILTTNNIAATAEYYYINLKTQKLHEYYIENYNTALGYKKYSKEMEFLRSLAYRSERVKIKSIDDVKQVLDKDSNFIIGKITLPFKKEWQRLYREWQNTTIKDDYEFLKSFFNVKSITKLHKKVRKDFSLPISTNEGKFLVKRKTWDNNFIYQILNDSDSRVDGTKPFIPAFDISKNEIVEAIIDSFTSKNIFWLPKNIELQKVDNKNIFAIDTSKWFEVETPSDLRDIGVATIQYKIDNNSRPKVRVKLDYVIDDDSKINYFTNHSLLKSRYPDKVLEILKQSTTIEFESSGFNKTIKEMLGMTLAGIYNETSNN

SEQ ID NO: 435 - protein, 244 aa, Francisella tularensis
ARKQNSEIYNKLMQKILEFKLRKLCTDIKDDKVSTKTLKEITSYEFELLADYLANYSESLKTQKFSYTDKQGNLKELSYYHHDKYNIQEFLKRHATINDEILDTLLTDDFDIWNFNFEKFDFDKNEEKLQNQEDKDHTQAYLHHFVFAVNKIKSEMASGGRHRSQYFQEITNVLDENNHQEGYLKNFCENLHNKKYSNLSVKNLVNLVGNLSNLELKPLRKYFNDKNLIIGMSKSLQKLIATGY

SEQ ID NO: 436 - protein, 501 aa, Francisella tularensis
MEIEKKIADTIWDASKQDFKFGNYRSFINLTPQEQKAFRYALFLADENSIKQAVIRAINNRNRTFVNGTQRYFAEVLANNIYLRAKKENLNTDKISFDYFGIPTIGNGRGIADIRQLYEKVDSDIQAYAKGDKPQASYSHLIDAMIAFCVAADEHRNDGSIGLEIDKNYSLYLLDKNTGEVFTKDIFSQIKITDNEFSDKKLVRKKATEGFNTHRQMTRDGIYAENYLPILIHKELDEVRKGYTWGNSEELKIHKGKKYNIQQLNNIVYCLKFIDKSISIDIQISTLEELRNILTTNNIAATAEYYYINLKNQKLHEYYIENYNTALDYKKYSKEMEFLRSLAYRSERVKIKSIDDVKQVLDKDSNFIIGKITLPFKKEWQRLYLEWQNTTIKDDYEFLKSFFNVKSITKLHKKVRKDFSLPISTNEGKFLVKRKTWDNNFIYQILNDSDSRVDGTKPFIPAFDISKNEIVEAIIDSFTSKNIFWLPKNIELQNVDKIFLL

SEQ ID NO: 437 - protein, 158 aa, Francisella tularensis
MIDFLLELDPCITIPPYLDNNNRKPPKCQSLILNPKFLDNQYPNWQQYLQELKKLQSIQDYLDSFETDLKDLKSSKDQPYFVEYKSSNQQMASGQRDYKDLDARILQFIFDRVKASDELLLNEIYFQAKKLKQKASSELEKLESSKKLDEVIANSQLS

SEQ ID NO: 438 - protein, 878 aa, Francisella tularensis
MLNDLAGVLQVSRNQLLSSVEEWFQQAQRVGEISKSQDEQIFEWLKSFKIASYCKAAVEMQKQYRGTLKNAIQTAIFRQSENINKNKNKNKNTGNQQQALSENSKDVKSLTADEKKLLKLIENIAKASQKIGESLGLNDKQIKKFNSIYNFAQIQQIAFAERKGNANTCAVYSADNAHRMQQIKITELVEDNKDNIILSAKAQRLPAIPTRIVDGAVKKMATILAKNIVDDNWQNIKQVLSAKHQLHIPIITESNAFEFEPALADVKGKSLKDRRKKALERISPENIFKDKNNRIKEFAKGISAYSGANLTDGDFDGAKEELDHIIPRSYKKYGTLNDEVNLICVTRDDNKNKGKRIFCLNDLANNYKLKQFETTDDLEIEKKIADTIWDASKQDFKFGNYRSFINLIPQEQKAFRYALFLADENSIKQAVIRAINNRNRTFVNGTQRYFAEVLANNIYLRAKKENLNTDKISFDYFGIPTIGNGRGIADIRQLYEKVDSDIQAYAKGDKPQASYSHLIDAMIAFCVAADEHRNDGSIGLEIDKNYSLYPLDKNTGEVFTKDIFSQIKITDNEFSDKKLVRKKATEGFNTHRQMTRDGIYAENYLPILIHKELDEVRKGYTWGNSEELKIHKGKKYNIQQLNNIVYCLKFIDKSISIDIQISTLEELRNILTTNNIAATAEYYYINLKNQKLHEYYIENYNTALDYKKYSKEMEFLRSLAYRSERVKIKSIDDVKQVLDKDSNFIIGKITLPFKKEWQRLYLEWQNTTIKDDYEFLKSFFNVKSINKLHKKVRKDFSLPISTNEGKFLVKRKTWDNNFIYQILNDSDSRVDGTKPFIPAFDISKNEIVEAIIDSFTSKNIFWLPKNIELQKVDKIFLL

SEQ ID NO: 439 - protein, 292 aa, Francisella tularensis
MLNDLAGVLQVSRNQLLSSVEEWFQQAQRVGEISKSQDEQIFEWLKSFKIASYCKAAVEMQKQYRGTLKNAIQTAIFRQSENINKNKNKNTGNQQQALSENSKDVKSLTADEKKLLKLIENIAKASQKIGESLGLNDKQIKKFNSIYNFAQIQQIAFAERKGNANTCAVYSADNAHRMQQIKITELVEDNKDNIILSAKAQRLPAIPTRIVDGAVKKMVTILAKNIVDDNWQNIKQVLSAKHQLHIPIITESNAFEFEPALADVKGKSLKDRRKKALERISPENIFKDKNIC

SEQ ID NO: 440 - protein, 53 aa, Francisella tularensis
MNHSLLKSRYPDKVLEILKQSTIIEFESSGFNKTIKEMLGMTLAGIYNETSNN

SEQ ID NO: 441 - protein, 393 aa, Francisella tularensis
MNVKILPIAIDLDVKNTGVFSAFYQKGTSLEKLDNKNGKVYELSKDSYTLLMNNRTAQRHQRRGIDRKQLVKRLFKLVWTEQLNLEWDKDTQQAISFLFNRRGFSFITDGYSTEYLNIVPEQVKAILMDIFDDYNGEDDLDSYLKLATEQESKISEIYNKLMQKILEFKLRKLCTDIKDDKVSTKTLKEITSYEFELLADYLANYSESLKTQKFSYTDKQGNLKELSYYHHDKYNIQEFLKRHATINDEILDTLLTDDFDIWNFNFEKFDFDKNEEKLQNQEDKDHTQAYLHHFVFAVNKIKSEMASGGRHRSQYFQEITNVLDENNHQEGYLKNFCENLHNKKYSNLSVKNLVNLVGNLSNLELKPLRKYFNDKNLIIGMSKSLQKLIATGY

SEQ ID NO: 442 - protein, 1629 aa, Francisella tularensis
MNVKILPIAIDLGVKNTGVFSAFYQKGTSLERLDNKNGKVYELSKDSYTLLMNNRTARRHQRRGIDRKQLVKRLFKLIWTEQLNLEWDKDTQQAISFLFNRRGFSFITDGYSPEYLNIVPEQVKAILMDIFDDYNGEDDLDSYLKLATEQESKISEIYNKLMQKILEFKLRKLCTDIKDDKVSTKTLKEITSYEFELLADYLANYSEILKTQKFSYTDKQGNLKELSYYHHDKYNIQEFLKRHATINDEILDTLLTDDLDIWNFNFEKFDFDKNEEKLQNQEDKDHTQAHLHHFVFAVNKIKSEMASGGRHRGQYFQEITNVLDENNHQEGYLKNFCENLHNKKYSNLSVKNLVNLIGNLSNLELKPLRKYFNDKIHAKADHWDEQKFTETYCHWILGEWRVGVKDQDKKDGAKYSYKDLCNELKQKVTKAGLVDFLLELDPCRTIPPYLDNNNRKPPKCQSLILNPKFLDNQYPNWQQYLQELKKLQSIQNYLESFETDLKVLKSSKDQPYFVEYKSSNQQIASGQRDYKDLDARILQFIFDRVKASDELLLNEIYFQAKKLKQKASSELEKLESSKKLDEVIANSQLSQILKSQHTNGIFEQGTFLHLVCKYYKQRQRARDSRLYIMPEYRYDKKLDKYNNTGRFDDDNQLLTYCNHKPRQKRYQLLNDLAGVLQVSPNFLKDKIGSDDDLFISKWLVEHIRGFKKACEDSLKIQKDNRGLLNHKINIARNTKGKCEKEIFNLICKIEGSEDKKGNYKHGLAYELGVLLFGEPNEASKPEFDRKIKKFNSIYSFAQIQQIAFAERKGNANTCAVCSADNAHRMQQIKITEPVEDNKDKIILSAKAQRLPAIPTRIVDGAVKKMATILAKNIVDDNWQNIKQVLSAKHQLHIPIITESNAFEFEPALADVKGKSIKDRRKKALERISPENIFKDKNNRIKEFAKGISAYSGDNLASGDFDGAKEELDHIIPRSHKKYGTLNDEANLICVTRDDNKNKGNRIFCLHDLANNYKLKQFETTDDLEIEKKIADTIWDASKKDFKFGNYRSFINLTPQEQKAFRHALFLADENPIKQAVIRAINNRNRTFVNGTQRYFAEVLANNIYLRAKKENLNTDKISFDYFGIPTIGNGRGIVEIRQLYEKVDSDIQAYAKGDKPQASYSHLIDAMLAFCIAADEHRNDGSIGLEIDKNYSLYPLDKNTGEVFTKDIFSQIKITNNEFSDKKLVRKKATEGFNTHRQMTRDGIYAENYLPILIHKELDEVRKGYTWGNSEELKIHKGKKYDIQQLNNLVYCLKFIDKSISIDIQISTLEELRNILTTNNIATTAEYYYINLKTQKLHEYYIENYNTALGYKKYTKEMEFLRSLAYRSERVKIKSIDDVKQVLDKDSNFIIGKITLPFKKEWQRLYREWQNTTIKDDYEFLKSFFNVKSITKLHKKVRKDFSLPISTNEGKFLVKRKTWDNNFIYQILNDSDSRVDGTKPFIPAFDISKNEIVEAIIDSFTSKNIFWLPKNIELQKVDNKNIFAIDTSKWFEVETPSDLRDIGVATIQYKIDNNSRPKVRVKLDYVIDDDSKINYFTNHSLLKSRYPDKVLEILKQSTIIEFESSGFNKTIKEMLGMTLAGIYNETSNN

SEQ ID NO: 443 - protein, 285 aa, Francisella tularensis
MTRDGIYAENYLPILIHKELDEVRKGYTWGNSEELKIHKGKKYNIQQLNNIVYCLKFIDKSISIDIQISTLEELRNILTTNNIAATAEYYYINLKNQKLHEYYIENYNTALDYKKYSKEMEFLRSLAYRSERVKIKSIDDVKQVLDKDSNFIIGKITLPFKKEWQRLYLEWQNTTIKDDYEFLKSFFNVKSITKLHKKVRKDFSLPISTNEGKFLVKRKTWDNNFIYQILNDSDSRVDGTKPFIPAFDISKNEIVEAIIDSFTSKNIFWLPKNIELQKVDKIFLL

SEQ ID NO: 444 - protein, 1323 aa, Fructobacillus fructosus
MVYDVGLDIGTGSVGWVALDENGKLARAKGKNLVGVRLFDTAQTAADRRGFRTTRRRLSRRKWRLRLLDELFSAEINEIDSSFFQRLKYSYVHPKDEENKAHYYGGYLFPTEEETKKFHRSYPTIYHLRQELMAQPNKRFDIREIYLAIHHLVKYRGHFLSSQEKITIGSTYNPEDLANAIEVYADEKGLSWELNNPEQLTEIISGEAGYGLNKSMKADEALKLFEFDNNQDKVAIKTLLAGLTGNQIDFAKLFGKDISDKDEAKLWKLKLDDEALEEKSQTILSQLTDEEIELFHAVVQAYDGFVLIGLLNGADSVSAAMVQLYDQHREDRKLLKSLAQKAGLKHKRFSEIYEQLALATDEATIKNGISTARELVEESNLSKEVKEDTLRRLDENEFLPKQRTKANSVIPHQLHLAELQKILQNQGQYYPFLLDTFEKEDGQDNKIEELLRFRIPYYVGPLVTKKDVEHAGGDADNHWVERNEGFEKSRVTPWNFDKVFNRDKAARDFIERLTGNDTYLIGEKTLPQNSLRYQLFTVLNELNNVRVNGKKFDSKTKADLINDLFKARKTVSLSALKDYLKAQGKGDVTITGLADESKFNSSLSSYNDLKKTFDAEYLENEDNQETLEKIIEIQTVFEDSKIASRELSKLPLDDDQVKKLSQTHYTGWGRLSEKLLDSKIIDERGQKVSILDKLKSTSQNFMSIINNDKYGVQAWITEQNTGSSKLTFDEKVNELTTSPANKRGIKQSFAVLNDIKKAMKEEPRRVYLEFAREDQTSVRSVPRYNQLKEKYQSKSLSEEAKVLKKTLDGNKNKMSDDRYFLYFQQQGKDMYTGRPINFERLSQDYDIDHIIPQAFTKDDSLDNRVLVSRPENARKSDSFAYTDEVQKQDGSLWTSLLKSGFINRKKYERLTKAGKYLDGQKTGFIARQLVETRQIIKNVASLIEGEYENSKAVAIRSEITADMRLLVGIKKHREINSFHHAFDALLITAAGQYMQNRYPDRDSTNVYNEFDRYTNDYLKNLRQLSSRDEVRRLKSFGFVVGTMRKGNEDWSEENTSYLRKVMMFKNILTTKKTEKDRGPLNKETIFSPKSGKKLIPLNSKRSDTALYGGYSNVYSAYMTLVRANGKNLLIKIPISIANQIEVGNLKINDYIVNNPAIKKFEKILISKLPLGQLVNEDGNLIYLASNEYRHNAKQLWLSTTDADKIASISENSSDEELLEAYDILTSENVKNRFPFFKKDIDKLSQVRDEFLDSDKRIAVIQTILRGLQIDAAYQAPVKIISKKVSDWHKLQQSGGIKLSDNSEMIYQSATGIFETRVKISDLL

SEQ ID NO: 445 - protein, 1367 aa, Fusobacterium sp.
MKKQKFSDYYLGFDIGTNSVGWCVTDLDYNVLRFNKKDMWGSRLFDEAKTAAERRVQRNSRRRLKRRKWRLNLLEEIFSDEIMKIDSNFFRRLKESSLWLEDKNSKEKFTLFNDDNYKDYDFYKQYPTIFHLRDELIKNPEKKDIRLIYLALHSIFKSRGHFLFEGQNLKEIKNFETLYNNLISFLEDNGINKSIDKDNIKKLEKIICDSGKGLKDKEKEFKEIFNSDKQLVAIFKLSVGSSVSLNDLFDTDEYKKEEVEKEKISFREQIYEDDKPIYYSILGEKIELLDIAKSFYDFMVLNNILSDSNYISEAKVKLYEEHKKDLKNLKYIIRKYNKENYDKLFKDKNENNYPAYIGLNKEKGKKEVVEKSGLKIDDLIKVIKGYLPKPERIEEKDKTIFNEILNKIELKTILPKQRISDNGTLPYQIHEVELEKILENQSKYYDFLNYEENGVSTKDKLLKTFKFRIPYYVGPLNSYHKDKGGNSWIVRKEEGKILPWNFEQKVDIEKSAEEFIKRMTNKCTYLNGEDVIPKDSFLYSEYIILNELNKVQVNDEFLNEENKRKIIDELFKENKKVSEKKFKEYLLVNQIANRTVELKGIKDSFNSNYVSYIKFKDIFGEKLNLDIYKEISEKSILWKCLYGDDKKIFEKKIKNEYGDILNKDEIKKINSFKFNTWGRLSEKLLTGIEFINLETGECYSSVMEALRRTNYNLMELLSSKFTLQESIDNGNKEMNEVSYRDLIEESYVSPSLKRAILQTLKIYEEIKKITGRVPKKVFIEMARGGDETMKNKKIPARQEQLKKLYDSCGNDIANFSIDIKKMKSSLSSYDNNSLRQKKLYLYYLQFGKCMYTGREIDLDRLLQNNDTYDIDHIYPRSKVIKDDSFDNLVLVLKNENAEKSNEYPVKKEIQEKMKSFWRFLKEKNFISDEKYKRLTGKDDFELRGFMARQLVNVRQTTKEVGKILQQIEPEIKIVYSKAEIASSFREMFDFIKVRELNDTHHAKDAYLNIVAGNVYNTKFTEKPYRYLQEIKENYDVKKIYNYDIKNAWDKENSLEIVKKNMKKNTVNITRFIKEEKGQLFDLNPIKKGETSNEIISIKPKLYNGKEEKLNEKYGYYKSLNPAYFLYVEHKEKNKRIKSFERVNLVDVNNIKDEKSLVKYLIENKKLVEPRLIKKVYKRQVILINDYPYSIVALDSNKLMDFENLKPLFLENKYEKILKNVIKFLEDNQGKSEENYKFIYLKKKDRYEKNETLESVKDRYNLEFNEMYDKFLEKLDSKDYKNYINNKKYKNLLDVKEKFIKLNLFDKAFTLKSFLDLFNRKTMADFSKVGLTKYLGKIQKISSNVLSKNELYLLEESVTGLFVKKIKL

SEQ ID NO: 446 - protein, 1367 aa, Fusobacterium sp.
MKKQKFSDYYLGFDIGTNSVGWCVTDLDYNVLRFNKKDMWGSRLFDEAKTAAERRVQRNSRRRLKRRKWRLNLLEEIFSDEIMKIDSNFFRRLKESSLWLEDKNSKEKFTLFNDDNYKDYDFYKQYPTIFHLRDELIKNPEKKDIRLIYLALHSIFKSRGHFLFEGQNLKEIKNFETLYNNLISFLEDNGINKSIDKDNIKKLEKIICDSGKGLKDKEKEFKEIFNSDKQLVAIFKLSVGSSVSLNDLFDTDEYKKEEVEKEKISFREQIYEDDKPIYYSILGEKIELLDIAKSFYDFMVLNNILSDSNYISEAKVKLYEEHKKDLKNLKYIIRKYNKENYDKLFKDKNENNYPAYIGLNKEKGKKEVVEKSGLKIDDLIKVIKGYLPKPERIEEKDKIIFNEILNKIELKTILPKQRISDNGTLPYQIHEVELEKILENQSKYYDFLNYEENGVSTKDKLLKTFKFRIPYYVGPLNSYHKDKGGNSWIVRKEEGKILPWNFEQKVDIEKSAEEFIKRMTNKCTYLNGEDVIPKDSFLYSEYIILNELNKVQVNDEFLNEENKRKIIDELFKENKKVSEKKFKEYLLVNQIANRTVELKGIKDSFNSNYVSYIKFKDIFGEKLNLDIYKEISEKSILWKCLYGDDKKIFEKKIKNEYGDILNKDEIKKINSFKFNTWGRLSEKLLTGIEFINLETGECYSSVMEALRRTNYNLMELLSSKFTLQESIDNGNKEMNEVSYRDLIEESYVSPSLKRAILQTLKIYEEIKKITGRVPKKVFIEMARGGDETMKNKKIPARQEQLKKLYDSCGNDIANFSIDIKKMKSSLSSYDNNSLRQKKLYLYYLQFGKCMYTGREIDLDRLLQNNDTYDIDHIYPRSKVIKDDSFDNLVLVLKNENAEKSNEYPVKKEIQEKMKSFWRFLKEKNFISDEKYKRLTGKDDFELRGFMARQLVNVRQTTKEVGKILQQIEPEIKIVYSKAEIASSFREMFDFIKVRELNDTHHAKDAYLNIVAGNVYNTKFTEKPYRYLQEIKENYDVKKIYNYDIKNAWDKENSLEIVKKNMKKNTVNITRFIKEEKGQLFDLNPIKKGETSNEIISIKPKLYNGKEEKLNEKYGYYKSLNPAYFLYVEHKEKNKRIKSFERVNLVDVNNIKDEKSLVKYLIENKKLVEPRLIKKVYKRQVILINDYPYSIVALDSNKLMDFENLKPLFLENKYEKILKNVIKFLEDNQGKSEENYKFIYLKKKDRYEKNETLESVKDRYNLEFNEMYDKFLEKLDSKDYKNYINNKKYKNLLDVKEKFIKLNLFDKAFTLKSFLDLFNRKTMADFSKVGLTKYLGKIQKISSNVLSKNELYLLEESVTGLFVKKIKL

SEQ ID NO: 447 - protein, 1367 aa, Fusobacterium sp.
MKKQQFSDYYLGFDIGTNSVGWCVTDFNYNVLRFNKKDMWGSRLFDEAKTAAERRVQRNSRRRLKRRKWRLNLLEEIFSDEILKIDSNFFRRLKESSLWLEDKSSKEKFTLFNDDNYKDYDFYKQYPTIFHLRNELIKNPEKKDIRLVYLALHSIFKSRGHFLFEGQNLKDIKNFETLYNNLMAFLEDNDIYKNIDSSYIGNLENIICDSKKGLKDKEKEFKEIFNSDKQLVGFFKLSVGSSVSLNDLFDTDEYKKGEVEKEKISFREQIYEDDKPIYYSILGEKIEFLDIAKSFYDFMVLNNILADSQYISEAKVKLYDEHKRDLKNLKYIIRKYNKENYDKLFKDKNESNYSAYIGLNKEKGKKEVIEKSRLKIDDFAKIIKGYLPKAEKIDEKDRSIFNEILDKIELKTILPKQRISDNGTLPYQIHEAELEKILENQAKYYDFLNHEENGISTKDKLLMTFKFRIPYYVGPLNSYHKNKGGNSWIVRKEEGKILPWNFEQKVDIEKSAEEFIKRMTNKCTYLNGEDVIPKDSFLYSEYIILNELNKVQVNDEFLNKEIKKKIIEDLFKKSKKISEKNFREYLLVNQITNKTVELKGVKDAFNSNYVSYIKFKDIFGDKLNLDIYKEISEKSILWKCLYGDDKKIFEKKIKSVYGDILTKDEIKKINSFKFNTWGRLSEKLLTEIEFIDLETGECYSSVMDALRRTNYNLMELLSSKFTLQENIDNENKEVSEFSYRDLVEESYVSPSLKRAILQTLKIYEEIRKITGRIPKKVFIEMARGGDETMKNKKIPARQEQLKKLYDSCGKDISNFSIDIKEMKNSLNSYDNNSLRQKKLYLYYLQFGKCMYTGKEIDLNRLLQNNDTYDIDHIYPRSKVIKDDSFDNLVLVLKNENAEKSNEYPLKKEIQEKMKSFWKFLKEKNFISDEKYKRLTGKDEFELRGFMARQLVNVRQTTKEAGKILQQIEPEIKIVYSKAEIASSFREMFDFIKVRELNDTHHAKDAYLNIVAGNVYNTKFTEKPYRYLQEIKENYDVKKIYNYDIKNAWDKEKSLEIVKKNMEKNTVNITRFIKEEKGQLFDLNPIRKGETSNEIIAIKPKFYEGSTEKLNEKYGYYKSLNPAYFIYVEHKEKNKIIRSFERVNLVDVNKIKDEKSLIKYLIENKGLIEPKVIKKVYKRQVILINNFPYSIVALDSNKLMDFENLKPLFLERKYEKILKNAIKFLEDNQGKTEEYYKFLYLKKKDRNEKNETIDSVKERYNIEFNEMYDKFLEKLDSKDYKNYINNKKYSELVNVKEKFIKLNLFDKAFTLKSFLDLFNRKTMADFSKVGLTKYLGKIQKISSNVLSKNELHLLEESVTGLFVKKIKL

SEQ ID NO: 448 - protein, 1391 aa, Galbibacter sp.
MKTILGLDLGTNSIGWALVKEAENENEVSDIIKLGVRVNPLTVDELTNFEGGKAYSNNAERTLKRGARRNLQRYKLRRENLIEILLKNGLINKDTALTEVGKETTHQTLKLRSKSANEKVSLEDLAKILLSINKKRGYKSSRKVNAEDDGVAIDGMEVAKLLYDENMTPGEYVLRLLESGKKHLPDFYRSDLQEEFNLVWKKQSEFYPLILTKELFFELHGKNKSQTWAICKEPLGIVGVKLKGSAKEQKFARYRLRKEALTQQIELEHLAIVLQDINNDSNKSSGYLGAISDRSKELFFNKETVGQYQYKQLQKDPNTSLKNQVFYRQDYLDEFEVIWRNQAKFYPQLTNELKQEIRDVVIFYQRKLKSQKNLISFCQFESTQQNYVEKETGKTKIRTIGRRVIPRSSPLFQEFKIWQSLNNLKFVNSESNQIIQFIELEDDVKKVVFDELNLRGDLKPNQVLKILSKYMKIGKLTQWKCNLEEIEGNRTNSALYNVFQMIAEEEGYGFNWGKKSALEIKSELKAIFSSIGINDSILDFDFSKKLDQQLSYQLWHLLYSAEEGNSKITEEDKFTYGNTGVALKKKLHLKFGFKPEYSTLISNLRFTSDYGNLSSKAISKILPFLRDGSDYSKACQYAGYNHSNSLSADELDNRELKPKLELLKKNSLRNPVVEKILNQMVNVVNQVIDNYGKPDEVRIELARELKKSAKERSQMTKNISDATRRNAEIKKYLSKEFGIPNPTKGDVIRYRLWEELASNGYKDLFRDKYIPKEKLFSNEIDIEHIIPKALLFDDSFSNKTLAFKVDNLKKADRTAFDFMSTDFSKDVDSYIGRIETLHKDGKISSSKYKKLMIPKSKLVDGFIERDLRNTQYIAKQARKMLLEVFKTVVPTTGKITDKLREDWDLINVMKELNFPKYKALGLTKKIERFDVGSEKIKSINVIEGWSKRNDHRHHAMDALAVAFTTHNHIQYLNYLNARKDIHHEMHGTIKSIENQIIGKDVMGKRRFIPPISDLRMKAKLQIESILISFKNKNKVVTWSVNKTKLKGKDNYNKRRQLTPRGQLHKETVYGKIKLIDPKPLKLNNKFTLVRASMIVDKVHREIVLQHLSKYDNNSEVAFDSKTIKIDPILIEGIGLKEVVCYEDVFKIRKKISGDNFKNEKHLEKVIDEKVKQILKDRVIKFQGNFKEAFSNLEENPIWLNKSKGIAVKSVAIKGVNNAESLHEGKDHFGDQILDKNKKQIPVDFVSTGNNHHVGIYEDKDGNLQERVVSFFEAVTRVNEGLPIIDKTYNSDIGWKFKFTMKQNEMFVFPSDDFDPNEFDLTDGKNAAKISPNLYRVQKIATKNYMFRHHLETVVTNDLEFTYKSIRSTGWLRNLVKVRINHLGEIVYVGEY

SEQ ID NO: 449 - protein, 1186 aa, Gardnerella vaginalis
MEGNISYAIGIDVGLNSVGLAAIRLDDYGEPIRILKAMSVIHDAGIDPNGAKESDTRKAISGVARRVRRLYRQRRRRLQKLDFLLQSLGWPVVENKDLDFSDSFIPWIFRAKLADEYIADEEQRKQMLSVAIRHIARHRGWRNPYQSIKSMMQETEYSEFYNELLKNIEKLAPGVGCEGSTPAQLVRDYLLSQQGKASRRLRITTGGRRKNHPHSLDPVLPRKLMQSDNMLEILNIFNVQHIDDKYVREQIINAVFYAESPRGSAENRVGKDAITGKGKRALKASLAFQKYRIISTISNLRIRENSKERCLTIEEKQNVYKLLTTSIDKSSKRKSAEAPLYTWIDVADCLGIERYKLRGVGSQIGDGESVGNRPPMLNSELAILYANNKSLGQSLITWWLASNRTQEDKEALIEILSNTVDIEAIHDNPEYQDKYGSAIAFIDSMNETEIAALENISLPDGRAAYSLETLDELNKQMLETDDDLFEARKKLFNLPNNWRPAEAPIAEPTGNPSVDRVLKIVHRFLISAKNRWGNPERINIEHVRSGFQSKKMANSYKELLDKRTEGKENLKAMMRNSLHLGTSDSISDADIRRYEAVQRQNGQCLYCGSEITYHTCELDHIVPRKGPGSTNTRENLVATCSSCNAQKCNTPFATWCEQSTYCKNHDISADSAINRVRAFIFPPNSYDKRGANQFKKEVIARLKQKVGDEAFDNRSIESVAWMANELHRRIDWYYNSQNYQTNNGISDISNKAQTNVGVYAGSLTAIARRMSGIDGKLEFFDGRRKTRFDRRHHAVDASVIAMMTPGIAQILAIKCNLRETQLLQGNKVVPGGIDWKEYPTANDQGYQQYANWSVRMNALLKLLNEEMRADRIAVVNSIRLRYSNSSVHQYEVNALLKLHVGDEIDSETIRRSSTPALYCALTRNPDYDVNNGFPENPGRTILLHNKKLNADDSITFFKAQAVQLFVREGSAKIGNSIHHLRIYEYFEKLKSGKIKKSYGMIRVFQNDLHRHIHEDLFSCDLPEQSISMRYADTKVAHAVQTGNANYLGYLVPGDEIIVDFSHITLSENIGKFVEFLNKIGADCTAYRHWVVVGTDTEKVLILKPSMISSEGIDKLYSNCERNNFDYSSYEKSINEILAGKGWRVSVNVLAQYKAATIRRNALGEVRWASRSHLPISWSWDTGENRE

SEQ ID NO: 450 - protein, 1186 aa, Gardnerella vaginalis
MEGNISYAIGIDVGLNSVGLAAIRLDNNGEPIRILKAMSVIHDAGIDPNGAKESDTRKAISGVARRVRRLYRQRRRRLQKLDFLLHSLGFPVVENKDLDFSDSFIPWIFRAKLADEYIADEKQRKQMLSVAIRHIARHRGWRNPYQSIKSMTQETEYSEFYNELLKNIEKFAPGVGCEGSTPAQLVRDYLLLQQGKASRRLRITTDEKRKNHPNSLNPILPRKLMQSDNMLEILNIFNVQHIDDKYVREQIINAVFYAKSPRGSAENRVGKDAITGKGKRALKASLAFQKYRIISTISNLRIRENSKERCLTIEEKQSVYKLLTTSTDESSKEKSAEAPLYTWIDVADCLGIERYKLRGVGSQIGDGESVGNRPPMLNSELAIIYANNKSLGKSLLTWWLDANRTQEDKEALIEILSNTVDIEAIHDNPEYQDKYGSAIAFIDSMDETEIAALENISLPDGRAAYSLETLDKLNKQMLETDDDLFEARKKLFNLPNNWRPSEAPIAEPTGNPSVDRVLKIVHRFLISAKNRWGNPERINIEHVRSGFKSKKMANSYKELLDKRTKGKENLKAMMRNSLHLGMSDSISDADIRRYEAVQRQNGQCLYCGSEITYHTCELDHIVPRKGPGSTNTRENLVATCSLCNAQKCNTPFSTWCEQSTYCKNHDISVDSAINRVRAFIFPPNSYDKRGANQFKKEVIARLKQKVGDEAFDNRSIESVAWMANELHRRIDWYYNSQNYQTNNGISDITNKAQTNVGVYAGSLTAIARRMSGIDGKLEFFDGRRKTRFDRRHHAVDASVIAMMTPGIAQILAIKCNLRETQLLQGNKVVPGGIDWKEYPTANDQGYQQYANWSVRMNALLKLLNEEMRADRIAVVNSIRLRYNNSSVHQYKVNALLKLHVGDEIDSGTIRRSSTPALYCALTRNPDYDVNNGLPENPNRAILLHDKKLNADDSITFFKAQAVQLFVREGSAEIGSSTHHLRIYEYFKKLKSGKIKKSYGMIRVFQNDLHRHIHEDLFSCDLPEQSISMRYADTEVAHAVQTGNSNYLGYLVPGDEIIVDFSHVKLSGNIGTFVEFLNKIGANCAAYNHWVVVGTDTEKVLILKPSMISSEGIDKLYSNCKRNNFDYSSYEKSINEILVGKGWRVSVNVLAKYNAETIRRNALGEVRWTSRSHLPISWSWNTGENRE

SEQ ID NO: 451 - protein, 1258 aa, Gemella haemolysans
MTEENPDIRKVFLAIHHILKNRGHFLLQGQSFKEGNLNNLIKELLNLDILHISIEITEENINKITEIALEKKTLTDKVNDLKKIYPKEKQLLEAFRLIFGGKTSLDKLFAIDEYKELDASVKSVSFKEKIYEEVRHDYEQVLSNYIELLDLAKLVYDSIILSDIKKEGKTLSESKVELYHKHREDLTKLKTLVKNDSKLSEDKKVELYSAIFKEDKDKGTNYVNYIRKSEEGKGCNYEDFKKFLVKELAKLEESSAKEEILRDLELELFLPLQRTKDNSVVPYQIHKEELVKILDNAAKYHKFLNEKDDSGYSIIEKVIQLLEFRIPYYVGPLNSSKKAKVDGFAWSVRNKGYENTPVTPWNYEKVIDESASAEKFITNLTNKCTYLKGEDVLPKSSLLYSEFALLNELNALKYDGNRISLEARNVIIEKLFKEQGKKVTKTSIKNLLKAEGYIDGKGEITGIDITVKNDLKSYRDFKKILGDKFNTEHVENIILWITLYGESRKLIKAKIEAVYGDIYSKEEIAKMSRLVYKDWGRFSRKLLTELVSKKLYNEETGECLNIIGAMRQNNILFMELLADRFDYSQQIIDYNKELQKEVTEITPEILDDLYVSPSVKRSIWQTVRIVEELKKIIGCAPAKIFVETTRSNQDKKKPTDSRKKQLELFYKAVKKDVKDLEKEIGSLNFDKLNERLSSVEPSKLKAKKLYLYYTQLGRCMYSGETIDITQLNTTAYDIDHIYPQSKVKDDSFTNTVLVKREYNAAKTDRYPLGSDIQTPSNRRFWKFLKEKGLITDEKYNRLVRTEEFSDEELTGFIARQLVETSQSVKAVAGILGELNPKTSICYSKAENVSSFRQNFGKIKEGNRKSDNTEQLIKVREINDYHHAKDAYLNVVVGNVYDTKFTRNVFNFIKDKKDGRKYSLNNVFYENVSNSNNVAWELNKTVHQVEKVMNNNNILVTRRTSEQKGGLFDATVYKAKVAAKAKEGVYYPLKTSDPVVNDVTKYGGFTKVKIAYYSIFEYTLVNKKGEEKITRIIPIPIYVSQNIKDDSTLLEFGKTQINIKSGEEVKDFKLKYRKLCIGDLVKINNFFNFIGGKTNDSFVYDGAVQVTLDTESERYIKTLSKYQNWKKENKDGELWESITKEKNTELYNLLVEKMNSGIFIKKKPNKFNELNSEEIRNNFSSISLEEQAKVLLEVLNLLTNKKSIFDLKSINITAARGKISFNLSNLSQFSIIEQSVAGFYEKEITIIGDKENDMENNNC

SEQ ID NO: 452 - protein, 1054 aa, Haemophilus parainfluenzae
MENKNLNYILGLDLGIASVGWAVVEIDEKENPLRLIDVGVRTFERAEVPKTGESLALSRRLARSARRLTQRRVARLKKAKRLLKSENILLSTDERLPHQVWQLRVEGLDHKLERQEWAAVLLHLIKHRGYLSQRKNESKSENKELGALLSGVDNNHKLLQQATYRSPAELAVKKFEVEEGHIRNQQGAYTHTFSRLDLLAEMELLFSRQQHFGNPFASEKLLENLTALLMWQKPALSGEAILKMLGKCTFEDEYKAAKNTYSAERFVWITKLNNLRIQENGLERALNDNERLALMEQPYDKNRLFYSQVRSILKLSDEAIFKGLRYSGEDKKAIETKAVLMEMKAYHQIRKVLEGNNLKAEWAELKANPTLLDEIGTAFSLYKTDEDISAYLAGKLSQPVLNALLENLSFDKFIQLSLKALYKLLPLMQQGLRYDEACREIYGDHYGKKTEENHHFLPQIPADEIRNPVVLRTLTQARKVINGVVRLYGSPARIHIETGREVGKSYKDRRELEKRQEENRKQRENAIKEFKEYFPHFAGEPKAKDILKMRLYKQQNAKCLYSGKPIELHRLLEKGYVEVDHALPFSRTWDDSFNNKVLVLANENQNKGNLTPFEWLDGKHNSERWRAFKALVETSAFPYAKKQRILSQKLDEKGFIERNLNDTRYVARFLCNFIADNMHLTGEGKRKVFASNGQITALLRSRWGLAKSREDNDRHHALDAVVVACSTVAMQQKITRFVRFEAGDVFTGERIDRETGEIIPLHFPTPWQFFKQEVEIRIFSDNPKLELENRLPDRPQANHEFVQPLFVSRMPTRKMTGQGHMETVKSAKRLNEGISVIKMPLTKLKLKDLELMVNREREKDLYDTLKARLEAFNDDPAKAFAEPFIKKGGAIVKSVRVEQIQKSGVLVREGNGVADNASMVRVDVFTKGGKYFLVPIYTWQVAKGILPNKAATQYKDEEDWEVMDNSATFKFSLHPNDLVKLVTKKKTILGYFNGLNRATGNIDIKEHDLDKSKGKQGIFEGVGIKLALSFEKYQVDELGKNIRLCKPSKRQPVR

SEQ ID NO: 453 - protein, 1052 aa, Haemophilus parainfluenzae]
MKNTSLNYVLGLDLGISSVGWAVVEIDEKENPLSLIDVGVRTFERAETQKGESLALARRLARSARRLTQRRVARLKKAKRLLKSENILLSTDECLPHQVWQLRVEGLERKLERQEWAAVLLHLIKHRGYLSQRKNESKSENKELGALLSGVANNHKLLQQTTYRTPAELAVKKFEVEEGHIRNQQGSYTHTFSRLDLLSEMELLFSRQQHFGNPFTSEKLLENLTALLMWQKPALSGDAILKMLGKCTFENEYKAAKHTYSAERFIWITKLNNLRIQENGLERALNDNERLALMKQPYEKAKLTYAQVRSILNLSDEAIFKGLRYSGEDKKTSETKTVLMEMKAYHQIRLALEKNDLKTEWAELKVNSSLLDEIGTAFSLYKTDEDISTCLAGKLSQPVLNALLENLNFDKFIQLSLKALHKILPLMQQGLRYDEACAEIYGDHYGKKTEENHLLLPQIPADEIRNPVVLRTLTQARKVINGVVRLYSSPARIHIETGREVGKSYQDRRELEKRQEENRKQREKAISEIKTLFPNFSGEPKAKDILKMRLYYQQNAKCLYSGKPLELHRLLEQGYVEIDHALPFSRTWDDSFNNKVLVLANENQNKGNLTPFEWLDGKNNSERWKAFKALVETSAFPYTKKQRILSQKLDEKGFIERNLNDTRYVARFLCNFIADNMHLTGEGKRKVFASNGQITALLRGRWGLAKSREDNDRHHALDAVVVACSTVSMQQKITRFVRFEEGNVFTGERIDRETGEIIPLHFPAPWKFFREEVEIRIFSDNPKLELENRLIARPQANHEFVQPLFVSRMPTRKMIGQGHMETIKSAKRLNEGLSVIKMLLTKLRLKDLESMVNREREKELYEALKARLEAFNDEPAKAFAEPFMKKGGAIVKSVRVEQVQKSGVLVRDGNGVADNASMVRVDVFTKGGKYFLVPIYTWQVAKGILPNKAVIQGKNEEDWEVMDDATFRFSLHQNDLVKLVTKKKTIFGYFNGLNRATGNIDIKEHDLEKSKVKDGIHQSIGIKLALSFEKYQVDELGKNIRLCKSSKRQAVR

SEQ ID NO: 454 - protein, 121 aa, Haemophilus pittmaniae
MLNRRYAAKITRFVRFEAGDVFTGERIDRETGEIIPLHFPTPWQFFKQEVEIRIFSDNPKLELENRLPDRPQANHEFVQPLFVSRMPTRKMTGQGHMETVKSAKRLNEGISVIKMPLTKLN

SEQ ID NO: 455 - protein, 203 aa, Haemophilus pittmaniae
MVNREREKDLYDALKARLEAFNDDPAKAFAEPFIKKGGAIVKSVRVEQVQKSGVLVREGNGVADNASMVRVDVFTKDGKYFLVPIYTWQVAKGILPNKAATQYKDEEDWEVMDNSAIFKFSLHPNDLVKLVTKKKTILGYFNGLDRATGNIAIKEHDLEKSKAKGGIHQGVGIKLALSFEKYQIDELGKNIRLCNPSKCQSVR

SEQ ID NO: 456 - protein, 1052 aa, Haemophilus sputorum
MKNTSLNYVLGLDLGISSVGWAVVEIDEKENPLSLIDVGVRTFERAETQKGESLALARRLARSARRLTQRRVARLKKAKRLLKSENILLSTDECLPHQVWQLRVEGLERKLERQEWAAVLLHLIKHRGYLSQRKNESKSENKELGALLSGVANNHKLLQQTTYRTPAELAVKKFEVEEGHIRNQQGSYTHTFSRLDLLSEMELLFSRQQHFGNPFTSEKLLENLTALLMWQKPALSGDAILKMLGKCTFENEYKAAKHTYSAERFIWITKLNNLRIQENGLERALNDNERLALMKQPYEKAKLTYAQVRSILNLSDEAIFKGLRYSGEDKKTSETKTVLMEMKAYHQIRLALEKNDLKTEWAELKVNSSLLDEIGTAFSLYKTDEDISTCLAGKLSQPVLNALLENLNFDKFIQLSLKALHKILPLMQQGLRYDEACAEIYGDHYGKKTEENHLLLPQIPADEIRNPVVLRTLTQARKVINGVVRLYSSPARIHIETGREVGKSYQDRRELEKRQEENRKQREKAISEIKTLFPNFSGEPKAKDILKMRLYYQQNAKCLYSGKPLELHRLLEQGYVEIDHALPFSRTWDDSFNNKVLVLANENQNKGNLTPFEWLDGKNNSERWKAFKALVETSAFPYTKKQRILSQKLDEKGFIERNLNDTRYVARFLCNFIADNMHLTGEGKRKVFASNGQITALLRGRWGLAKSREDNDRHHALDAVVVACSTVSMQQKITRFVRFEEGNVFTGERIDRETGEIIPLHFPAPWKFFREEVEIRIFSDNPKLELENRLIARPQANHEFVQPLFVSRMPTRKMTGQGHMETIKSAKRLNEGLSVIKMLLTKLRLKDLESMVNREREKELYEALKARLEAFNDEPAKAFAEPFMKKGGAIVKSVRVEQVQKSGVLVRDGNGVADNASMVRVDVFTKGGKYFLVPIYTWQVAKGILPNKAVIQGKNEEDWEVMDDATFRFSLHQNDLVKLVTKKKTIFGYFNGLNRATGNIDIKEHDLEKSKVKDGIHQSIGIKLALSFEKYQVDELGKNIRLCKSSKRQAVR

SEQ ID NO: 457 - protein, 1338 aa, Helcococcus kunzii
MQDYYLGLDIGTNSVGWAVTDENYNLLRKKGKDLWGVRLFKEAQPATERRGHRSSRRRTIRKSLRKQLLRELFEEEINAIDKDFFLRLDESKYWLEDKKIEGKYSLFNDENFTDKDYYEKFPTIFHLRKALIESDDKEDIRLYFLAINQMMKRRGHFLIDGKLSNVEDITPFKECIQNLINEELDTEIETEFYDKAIKIVSDYSLKKTEKKNLIKDLVKETDSIEDSKKIINIFNLLISGKSKVNGIFDDEEILEKIKEDNKEDFYLTSEKYEENLEYFSQLLDYRFELISSLKSIYDYIILQEVLKGKKYLSYAQVERYKNHKEDLRKLKQLIKKYDKNGKIYYQIFRDENFKKGYVAYLGYYKKNKKNVPVKKCDYDTFSKNIKSTLDKICDKEDPLYIELIDKIEKGGFLLKQIVSTNSVIPHQVHELELDKILENLEKNYPSFKEISDGVSKIDKIKMIFNFRIPYYVGPLNDYHKDKVNSNTWIVKNEGFENENIRPWNFSKIVDEHACEEEFIKRMINECSYIPGEKVLPKSSLLYSEYMVLNELNNLRVNGDKLNPKIKKEIVENIYKKERKVTLKKIRNFLIINNYVDSKVEFSGLSDGIKANMSSYIDFAEILDDNFDNNMVEDLIEQITIHVGNVKLLTEKISNKYPNLEKKQINKIVNLKFKDWARFSRKLLVGIEGTEKETGEINTIIGFLRETNENFMELMSNRYTFSEEISEIKKKYIPNKLSKQIVDDLYVSPAVKKMIWQVLNINDELIKVLGKQPKKIFIEMARGKEEKPEVKDSRKNKLIELYKNLGKEGKEWLNRIEDKTEADFRNRALYLYYTQMGRCMYTGEIIDIERLYDKELYDLDHIIPRKMKKDDSIHKNLVLVTRNSNQYEKKDNYPVPEVIKSRENVRHLWYALKKKGLITEEKYNRLTRINPLSDKELSEFIERQLVETRQTTKVVKDLFENYYTDSKIVTVKAGLVSELRRDFEVLKCREINDLNHAHDAFLNIIVGDVWSKKFTSNPYNFVKKNREKYTLNNIFTKNQKDLRGNEIWNCAEGKKRIIKTLNKPSVLFSVENFEQTGQLFDQNIIGKQDYKEKTSYVPIKGDERLQDISKYGGYRGISGAYFFIVEHTEKNKRVKTIESLPIYMKSYVEENGLLDFCTNEMKLVDPKIIVKKLNYKSEIIVDGFKYLISGKTENRLSLETNEYLYWNHTQTTDIKKILNINEKIELEKYNGDIESERENIIKYIQIILEKFKLKPFIKRRNLPNIEINFADYETEKLLQLLVNLIPLTTKYVSPVDLTVISGSKYAGKVLIPKKISNLNEVIFISKSITGIYESRRRII

SEQ ID NO: 458 - protein, 1023 aa, Helicobacter cinaedi
MKIYSFDIGVASIGWAFIENEVLQDCGIRIFTKAENPKNGASLALPRREARGVRKRLARRRGRLNTIKQLLCKEFGLQLEDYLSNDGELPKAYTASKANPLKSPYELRTLALSQKLDSKDLVRVILHIAKHRGYGNKHAKDSKDTESGKVKKAIEFNRKTLAEKGYRSVGEYLYREFFQQSRISQNNGATEFINVRNKAGNYEHCVAQDMLKEELESILNAQRQFGFSLKQDFENKLLTKIFEQRPLKSFADKVGNCCFIAGEKRTPKDSLSAIEFIALSRTINTLINLSKESGEIYNRAIILQIVESTLKKGEISYKELREIIRLDERLRFKDPRLDYSREIKEAEKVKFLEFKQLKGFKKALGESFTTLARSQLDEIAEHIALIKDRVKLNEKLESYALTKEQREALSNLSFSAHINLSLQALKQILPFMRGDNGEQCLDYDESVEKAGLKALSKDTLKGQMLPPLNEFEPYLSNPVVARALAEYRKVLNALLKQYGSPHKIHIEYAREAKLSSTERQKYEKEQKDNYAANQAAHKKCQELGLEPSSTNLLKLKLWQEQGGLCLYSGAKITISYLQDPTALQVDHIYPYSRSFDDSYMNKCLVLTKANQEKGNRTPFEAFGTDSAKWGVITTLAQKLPHKKRRRILNTAFNDKEAGFKLRNLNDTSYIARLVADYTETYLEFLPLVESENTTLGKGQKGSKKHIAIVNGALTSTMRYYLGFASKDRDNHLHHALDAVIIGFMNDSVIKAFSDFKKTQETSKAAYYAHTLSKQEYKKQRAFIQLPSGENFRASVLEKVESVFVSKPPRKRVRGALHEATFYSPNDPKLLKNYGGTKGVERALALGKMRKVGAKIVSNGAMVRVDIFRHKSSGKFYGVPVYTMDFALGILPNKAVVVGKDKNGVIKDWLEMDSSYEFIFSLYKDDLLLVQKKEMAEPELCYFMSFNSSIAQISVAKHDNNFSTLTKNQKLLFSNATQEDVSGKSIGIQNLQVFEKWQVSVLGEVKRTQSYPRENISLASKAKK

SEQ ID NO: 459 - protein, 1023 aa, Helicobacter cinaedi
MKIYSFDIGVASIGWAFIENEVLQDCGIRIFTKAENPKNGASLALPRREARGVRKRLARRRGRLNTIKQLLCKEFGLQLEDYLSNDGELPKAYTASKANPLKSPYELRTLALSQKLDSKDLVRVILHIAKHRGYGNKHAKDSKDTESGKVKKAIEFNRKTLAEKGYRSVGEYLYREFFQQSRISQNNGATEFINVRNKAGNYEHCVAQDMLKEELESILNAQRQFGFSLKQDFESKLLTKIFEQRPLKSFADKVGNCCFIAGEKRAPKDSPSAIEFIALSRTINTLINLSKESGEIYNRAIILQIVESTLKKGEISYKELREIIRLDERLRFKDPRLDYSREIKEAEKVKFLEFKQLKGFKKALGESFTTLAISQLDEIAEHIALIKDRVKLNEKLESYALTKEQREALSNLSFSAHINLSLQALKQILPFMRGDNGEQCLDYDESVEKAGLKALSKDTLKGQMLPPLNEFEPYLSNPVVARALAEYRKVLNVLLKQYGSPHKIHIEYAREAKLSSTERQKYEKEQKDNYAANQAAHKKCQELGLEPSSTNLLKLKLWQEQGGLCLYSGAKITISYLQDPTALQVDHIYPYSRSFDDSYMNKCLVLTKANQEKGNRTPFEAFGTDSAKWGVITTLAQKLPHKKRRRILNTAFNDKEAGFKLRNLNDTSYIARLVADYTETYLEFLPLVESENTTLSKGQKGSKKHIAIVNGVLTSTMRYYLGFASKDRDNHLHHALDAVIIGFMNDSVIKAFSDFKKTQETSKAAYYAHTLSKQEYKKQRAFIQLPSGENFRVSVLEKVESVFVSKPPRKRVRGALHEATFYSPNDPKLLKNYGGTKGVERALALGKMRKVGAKIVSNGAMVRVDIFRHKSSGKFYGVPVYTMDFALGILPNKAVVVGKDQNGVIKDWLEMDSSYEFIFSLYKDDVILVQKKEMQRPELCYFVSFDTSGASIKVAKHDNNFSTLTENQKLLFSNATKEEVVGKSIGIQNLKVFEKWQVSVLGEVKRTQSYPRENISLASKAKK

SEQ ID NO: 460 - protein, 344 aa, Helicobacter pullorum
MKILGFDIGIASIGWAFVENGELKDCGVRIFTKAENPKTGDSLAMPRREARSVRRRLARRKGRLETLKRLLAKEWDLCYEDYIAADGELPKAFMGKNLTNPYVLRYEALQRLLSKEELVRVVLHIAKHRGYGNKNAKITKSEESKREQGKILSALATNASVIARYRTVGEYFYKEFCEVIKNPQGLNTNENCTQPKVRVLKPIRNKGGEYTNCILQEDLQRELRCIFEHQKGFGFSITQEFQDKILKIAFYQRSLKDFSHLVGKCTFYPDEPRAPKFSLSAIEFITKAKAINLLASIAKESGEVWDKEQWRERLDSVFSAVCERGINTIPSSSHFLNIFDILYL

SEQ ID NO: 461 - protein, 1688 aa, Ignavibacterium album
MEFKKVLGLDIGTNSIGCALLSLPKSIQDYGKGGRLEWLTSRVIPLDADYMKAFIDGKNGLPQVITPAGKRRQKRGSRRLKHRYKLRRSRLIRVFKTLNWLPEDFPLDNPKRIKETISTEGKFSFRISDYVPISDESYREFYREFGYPENEIEQVIEEINFRRKTKGKNKNPMIKLLPEDWVVYYLRKKALIKPTTKEELIRIIYLFNQRRGFKSSRKDLTETAILDYDEFAKRLAEKEKYSAENYETKFVSITKVKEVVELKTDGRKGKKRFKVILEDSRIEPYEIERKEKPDWEGKEYTFLVTQKLEKGKFKQNKPDLPKEEDWALCTTALDNRMGSKHPGEFFFDELLKAFKEKRGYKIRQYPVNRWRYKKELEFIWTKQCQLNPELNNLNINKEILRKLATVLYPSQSKFFGPKIKEFENSDVLHIISEDIIYYQRDLKSQKSLISECRYEKRKGIDGEIYGLKCIPKSSPLYQEFRIWQDIHNIKVIRKESEVNGKKKINIDETQLYINENIKEKLFELFNSKDSLSEKDILELISLNIINSGIKISKKEEETTHRINLFANRKELKGNETKSRYRKVFKKLGFDGEYILNHPSKLNRLWHSDYSNDYADKEKTEKSILSSLGWKNRNGKWEKSKNYDVFNLPLEVAKAIANLPPLKKEYGSYSALAIRKMLVVMRDGKYWQHPDQIAKDQENTSLMLFDKNLIQLTNNQRKVLNKYLLTLAEVQKRSTLIKQKLNEIEHNPYKLELVSDQDLEKQVLKSFLEKKNESDYLKGLKTYQAGYLIYGKHSEKDVPIVNSPDELGEYIRKKLPNNSLRNPIVEQVIRETIFIVRDVWKSFGIIDEIHIELGRELKNNSEERKKTSESQEKNFQEKERARKLLKELLNSSNFEHYDENGNKIFSSFTVNPNPDSPLDIEKFRIWKNQSGLTDEELNKKLKDEKIPTEIEVKKYILWLTQKCRSPYTGKIIPLSKLFDSNVYEIEHIIPRSKMKNDSTNNLVICELGVNKAKGDRLAANFISESNGKCKFGEVEYTLLKYGDYLQYCKDTFKYQKAKYKNLLATEPPEDFIERQINDTRYIGRKLAELLTPVVKDSKNIIFTIGSITSELKITWGLNGVWKDILRPRFKRLESIINKKLIFQDEDDPNKYHFDLSINPQLDKEGLKRLDHRHHALDATIIAATTREHVRYLNSLNAADNDEEKREYFLSLCNHKIRDFKLPWENFTSEVKSKLLSCVVSYKESKPILSDPFNKYLKWEYKNGKWQKVFAIQIKNDRWKAVRRSMFKEPIGTVWIKKIKEVSLKEAIKIQAIWEEVKNDPVRKKKEKYIYDDYAQKVIAKIVQELGLSSSMRKQDDEKLNKFINEAKVSAGVNKNLNTTNKTIYNLEGRFYEKIKVAEYVLYKAKRMPLNKKEYIEKLSLQKMFNDLPNFILEKSILDNYPEILKELESDNKYIIEPHKKNNPVNRLLLEHILEYHNNPKEAFSTEGLEKLNKKAINKIGKPIKYITRLDGDINEEEIFRGAVFETDKGSNVYFVMYENNQTKDREFLKPNPSISVLKAIEHKNKIDFFAPNRLGFSRIILSPGDLVYVPTNDQYVLIKDNSSNETIINWDDNEFISNRIYQVKKFTGNSCYFLKNDIASLILSYSASNGVGEFGSQNISEYSVDDPPIRIKDVCIKIRVDRLGNVRPL

SEQ ID NO: 462 - protein, 1354 aa, Indibacter alkaliphilus
MKKILGLDLGTTSIGWAFIKEPEKDVVGSEIVDMGVRIVPLSSDEENDFAKGNTISINADRTLKRGARRNLQRFKQRRNALLETFKEKNLIPSNFQYAEDGPSSTFSTLKLRDKAAKEKIELDDFVKVLLQINKKRGYKSSRKAMSEEDEGTAIDSMGIAKELYENDLTPGQWVYEALKNGRKNVPDFYRSDLQEEFKKIVNYQSEFYPDILNTSFVEDWMGKASTPTKQYFNKRGVQLAENKGKREERRLQEYKWRAEAVNFKIDLSEIALILSQINSQISNSSGYLGAISDRSKELYFKNLTVGQYLYQQVKKNPHTRLKGQVFYRQDYLDEFEKIWSVQSSFYPQLNDELKQEVRDVTIFFQRRLKSQKHLISNCEFEEHHKVVPKSHPIFQEFRIWQNLNNLTLIKKDNLNEKCELALEDKTALANELAFKKELSVKDALKVLGLKPSDWEFNFTKIEGNRTNHAFFEAFAKIIELEDGEPIDLGNLKADDILDQFSEAFLRIGIDTELLQVNSDIEGAEYEKQSYIQFWHLLYSSEDDQKLKQNLIRKFGFKPEHAKILASISLQDDHASLSSRAIKKILPHLQSGLIYDKACTYAGYNHSSSFTKDENEKRELRAELELLKKNSLRNPVVEKILNQMINVVNAILKDPNLGRPDEIRVEMARELKANAEQRKNMTSNIASATRDHEKYREILKKEFGLKRVTKNDLLRYKLWLETDGISLYTGKPIEASKLFSKEYDIEHIIPKARLFDDSFSNKTICERQLNIDKANVTAFSFLQNKLSADEFEQYQSRVKSLYGKLSKAKIQKLLMANDKIPEDFIARQLQETRYISKKAKEILFEITMRVSVTTGTITDKLREDWGLVEIMKELNWEKYDKLGLTYTIEGKHGERLNKIKDWNKRNDHRHHAMDALTVALTKPAYIQYLNNLNAKAIGNKKGTEIFAIEQKYLKRENGKLCFIPPIENIRAEAKKHLSKILVSYKAKNKVVTINKNKTKKKAGFNEQTALTPRGQLHKETVYGKSFHYSTKFEKIGASFDAQKINTVAKKEEREALLKRLAENGNDPKKAFTGKNSLNKMPIYLDLGKNIKLSEKVKTVVLEQNYTIRKNIDPDLKVDKVIDVGIKRILESRLEEFGGNAKLAFSNLEENPIWLNKEKGIPIKRVKISGVSNVESLHVKKDHFGEKILDEEGNEIPVDFVSTGNNHHVAIYEDEDGNLQDEVVNFYEAVIRRNQGESIIKYRHEEGWNFLYSIKQNEFFVFPSQDFNPNDFDLLDPKNYDLISPNLYRAQKFSKVMYGNSAVRDYVFRHHLETVLNDVKELKDVAYKQLKSLQYLNGIKKVRLNHLGQIIQVGEY

SEQ ID NO: 463 - protein, 1397 aa, Joostella marina
MKKVLGLDLGTNSIGWALVNEATKEEKKEGKSSEIIKLGVRVNPLTVDEKTNFEKGRPLSTNADRTLKRSARRNLQRYKLRRRNLIEILIKNGFITKDTPLTETGKDTTHQTLKLRAKSAKEKVDLKDFAKILLTINKKRGYKSSRKVNSDEDGLAIDGMAVAKHLYEQNLTPGQYVLNLLQKNKKYVPDFYRSDLQEEFKNIWNNQKTYYFDILTDTLFEELKDKNKSQTWAICKKPFDIAGIKQIGKASDKRLERYKWRTEGLTQKLNLEYLAIALQEINNDINKSSGYLGAISDRSKELFFNKETVGENLYRQLVKTPHTSLRNQVFYRQDYLDEFETIWETQAKFYPQLTHTLKEEIRDVIIFYQRKLKSQKSLISFCQFESWEQTYIEKETGKSKTRTVGRKVIPKSSPLFQEFKIWQNLNSLEFRNSDEGEIIEFIKLDEDIRQTVFEELNLRGNLKPNDVLKILGNYISLGKVSQWKCNFEEIEGNRTNAALYNVYQIIAENEGYGFDWAKKTASEINKELKNIFPQLGIDASILDFDFTQANFDKQTSYQLWHLLYSAEEDFKISEEDKVLYGNSSVSLKKKLHQKYGFKPEYTKLLTNISLQPDYGNLSAKAICNILPYLKENNVYSEACDLTGYNHSNFLTAEEQAKRPLKPILELLKKNSLRNPVVEKILNQMVNVVNQVIETYGKPDEIRIELTRELKKSAKERANMTKSIADATRRNDDYRKTIIKEFGIPNPTKSDVVRYRLWQELASRGYKDIFTDTEIKPQELFSNKIDIEHIIPKALLFDDSFSNKTLAFKKDNLKKANRTAYDFIANDYAPNLENYIERVESLHKDRKITRAKRNKLLMLQSKLPDGFIERDLRNSQYITKEAKKMLYEVCRTVVSTSGSITDKLREDWDLINVMKELNFPKYKALGLTEKIERYDIGAEKMKEVEIIEDWNKRNDHRHHAIDALTVAFSTHSHIQYLNHLNARRDEGHKKHAAIIAIESTITEKEGNKKRRFIAPLPNFRLQAKEHIESILVSFKNKNKVVTNNINKTKRIKKDKFNTKVQLTPRGQLHKETIYGKIKQPLEKHIKLNKSFTLEQAKLIIDKRQREKVLNHLEKYAHNSDIAFNSKTLKKNPLLISDEPLKEVLCFEEVFTIRKDISYDNFKNEKQLDKVIDEKVKQALKERINQYNGDFREAFSDIERNPIWLNKAKGICVKRATIKGVSNAEPLHTAKNHLGEEVLTENKEQIPVDYVSTGNNHHVAIYEDEDGNLQEKVVSFYEAVIRVNEGLPIIDKEYNKSLGWTFKFTMKQNEMFVFPSEDFNPTEIDLLDQKNASLISPNLFRVQKFTIKDYFFRHHLETTVENNNTLKNTTWRREGLSGIYGIIKIRLNHLGEIVQVGEY

SEQ ID NO: 464 - protein, 1060 aa, Kingella kingae
MAAKSLNYILGLDLGIASCGWAVVEMDEQENPLRLIDVGVRTFEEAENPKDGSSLAETRRLARAQRRLISRRANRMNKLCRLLKQENVLQANDYDEKGLIIGLPNQAWELRAQGLDRKLEPKEWAAVLIHLVKHRGYLSQRKNESQTADKELGALLSGMNHNHQLLQSQSNQYRTPAELAIKQFATQDGHIRNQRGAYTHTFNRLDLQNELNQLFDAQTRLGNPHVSGSLKTAINDLLMNQKAALSGDAILEMLGRCTFEPSEYKAAKNTYSAERFVWLGKLTNLRIQDNGLESALSREQRELLLNEPYNKTKLTYQQVRKLLRLPETAFFKGLRYGKDNAESATFMEMKSYHAIRKSLENKSLKSEWEKLKTQPKLLDLIGTAFSIYKTDDEIAGCLKNQLPENVIIALQGQLNFSNFMELSLKALEKLLPLMEQGLRYDEACTQIYGNRHEKIADKTEKFLPNIPADKLRNPVVLRTLTQARKVINAIIRRYGSPARVHIETGREVGKSFSDRDKLKKQQEENQEQRRRAIDEWKQFFPNAAHEPKAVDILKLRLYQLQQGKCLYSGLPIDVRRLPEKGYVEIDHALPFSRTWDDSFNNKILVLASENQNKGNQTPYEYLRGADNSESWRLFVENVQNCQFSPNKKQKIMAKQLDEKGFLERNLNDTRYVSRFLCQFISEHLHLTGKGKKRVFASNGQITALLRGRWGLSKNREENDRHHAVDAVVVACSTVAMQQKITQFVRYQKGNVFTGERIDKETGEVISIHFPTPWEHFREEVMIRVFDDNPLRTLPEKLPNRPEALHEYVMPLFVSRMPTRKMTGQGHKETIKSAKRLDEKISVLRVPLTQLKLNDLENMVNREREPALYEALKARLEQFKNDPAKAFAEPFFKQGGQQVKAVRVEIVQKSGMLLRKINGVADNGSMVRVDVFEKSGKFYLVPIYAWQVAEGILPNYAVVAHKDESDWILMDESYHFKFALYKNDLLEVQTKKGGIMGYFASLDRATGAITIREHDRDKKKCKDGEHRSIGVKMASSFKKLQVDELGKNIHETRSRKRPNIG

SEQ ID NO: 465 - protein, 1314 aa, Lactobacillus animalis
MLKKDYSIGLDIGTNSVGHAVVTDDYKVPTKKMKVFGDTSKKTIKKNMLGVLLFNEGQTAADTRLKRGTRRRYTRRKNRLRYLQEIFAPELAKVDPNFLYRLEESSLVAEDKKYDVYPIFGKREEELLYHDTYKTIYHLRSALANNDQPADLRLVYLALAHIIKYRGNFLLEGEIDLRTTDINKVFAEFSETLNENSDENLGKLDVADIFKNNTFSKTKKSEELLKLSGAKKNQLAHQLFKMMVGNMGSFKKVLGTDEEHKLSFGKDTYEDDLNDLLAEAGDQYLDIFVAAKKVYDAAILASILDVKDTQTKTVFSQAMIERYEEHQKDLIELKRVFKKYLPEKCHDFFSEPKISGYAGYIDGKVSEEDFYKYTKKTLKGIPETEEILQKIDANNYLRKQRTFDNGAIPHQVHLKELVAIVENQGKYYPFLRENKDKFEKILNFRIPYYVGPLARGNSKFAWLTRAGEGKITPYNFDEMIDKETSAEDFIKHMTINDLYLPTEPVLPKHSLLYERYTIFNELAGVRYVTENGEAKYFDAQTKRSIFELFKLDRKVSEKMVIKHLKVVMPAIRIQALKGLDNGKFNASYGTYKDLVDMGVAPELLNDEVNSEKWEDIIKTLTIFEGRKLIKRRLENYRDFLGEDILRKLSRKKYTGWGRLSAKLLDGIYDKKTHKTILDCLMTEDYSQNFMQLINDDNYSFKETIKNAQVIEKEETLAKTVQELPGSPAIKKGILQSLEIVDEIIKVMGYKPKSIVVEMARETQKTHGTRKREDRVQQIVENLKDANELPEKLPSNAELSDERKYLYCLQNGRDMYTGAPLDYDHLQFYDVDHIIPQSFLKDDSIENKVLTIKKENVRKTNGLPSEAVIQKMGSFWKKLLDAGAMTNKKYDNLRRNLHGGLNEKLKERFIERQLVETRQITKYVAQLLDQRLNYDGNGVELDEKIAIVTLKAQLASQFRSEFKLRKVRALNNLHHAHDAYLNAIVANLIMAKYPELEPEFVYGKYRKAKFKGLGKATAKNTLYANVLYFLKENEVYPFWDKARDLPTIKRYLYRAQVNKVRKAERQIGGFSDEMLVPKSDSGKLLPRKEGLDPVKYGGYAKAVESYAVLITADEVKKGKTKKVKTLVNIPIIDSKKYEADPTAYLASRGYTNVTNSFILPKYSLLEDPEGRRRYLASFKEFQKANELILPQHLVELLYWVNAKDGEQKLEDHKAEFKELFDKIMEFADKYVVAPKNSEKIRRLYEENQDATPMELGKNFVELLRYTADGAASDFKFFGENIPRKRYNSAGSLLNGTLIYQSKTGLYETRIDLGKL

SEQ ID NO: 466 - protein, 1371 aa, Lactobacillus buchneri
MKVNNYHIGLDIGTSSIGWVAIGKDGKPLRVKGKTAIGARLFQEGNPAADRRMFRTTRRRLSRRKWRLKLLEEIFDPYITPVDSTFFARLKQSNLSPKDSRKEFKGSMLFPDLTDMQYHKNYPTIYHLRHALMTQDKKFDIRMVYLAIHHIVKYRGNFLNSTPVDSFKASKVDFVDQFKKLNELYAAINPEESFKINLANSEDIGHQFLDPSIRKFDKKKQIPKIVPVMMNDKVTDRLNGKIASEIIHAILGYKAKLDVVLQCTPVDSKPWALKFDDEDIDAKLEKILPEMDENQQSIVAILQNLYSQVTLNQIVPNGMSLSESMIEKYNDHHDHLKLYKKLIDQLADPKKKAVLKKAYSQYVGDDGKVIEQAEFWSSVKKNLDDSELSKQIMDLIDAEKFMPKQRTSQNGVIPHQLHQRELDEIIEHQSKYYPWLVEINPNKHDLHLAKYKIEQLVAFRVPYYVGPMITPKDQAESAETVFSWMERKGTETGQITPWNFDEKVDRKASANRFIKRMTTKDTYLIGEDVLPDESLLYEKFKVLNELNMVRVNGKLLKVADKQAIFQDLFENYKHVSVKKLQNYIKAKTGLPSDPEISGLSDPEHFNNSLGTYNDFKKLFGSKVDEPDLQDDFEKIVEWSTVFEDKKILREKLNEITWLSDQQKDVLESSRYQGWGRLSKKLLTGIVNDQGERIIDKLWNTNKNFMQIQSDDDFAKRIHEANADQMQAVDVEDVLADAYTSPQNKKAIRQVVKVVDDIQKAMGGVAPKYISIEFTRSEDRNPRRTISRQRQLENTLKDTAKSLAKSINPELLSELDNAAKSKKGLTDRLYLYFTQLGKDIYTGEPINIDELNKYDIDHILPQAFIKDNSLDNRVLVLTAVNNGKSDNVPLRMFGAKMGHFWKQLAEAGLISKRKLKNLQTDPDTISKYAMHGFIRRQLVETSQVIKLVANILGDKYRNDDTKIIEITARMNHQMRDEFGFIKNREINDYHHAFDAYLTAFLGRYLYHRYIKLRPYFVYGDFKKFREDKVTMRNFNFLHDLTDDTQEKIADAETGEVIWDRENSIQQLKDVYHYKFMLISHEVYTLRGAMFNQTVYPASDAGKRKLIPVKADRPVNVYGGYSGSADAYMAIVRIHNKKGDKYRVVGVPMRALDRLDAAKNVSDADFDRALKDVLAPQLTKTKKSRKTGEITQVIEDFEIVLGKVMYRQLMIDGDKKFMLGSSTYQYNAKQLVLSDQSVKTLASKGRLDPLQESMDYNNVYTEILDKVNQYFSLYDMNKFRHKLNLGFSKFISFPNHNVLDGNTKVSSGKREILQEILNGLHANPTFGNLKDVGITTPFGQLQQPNGILLSDETKIRYQSPTGLFERTVSLKDL

SEQ ID NO: 467 - protein, 315 aa, Lactobacillus casei
MFKDYLKQLEDDGTAKAIRQLYDRYIDGDDAKPFVREDFVKALTKEVTAHPNAKSPELLERLAQPDFMLKQRNKANGAIPVQMQQRELDQIIKNQSVYYDWLAAPNPVEKHRKSMPYQLDELLNFRIPYYVGPLVTAKEQKAARGGVFAWMVRKDPDGNITPYNFDEKVDREASANTFIQRMKTTDTYLIGEDVLPKQSLLYQSYEVLNELNNVRVNDNKLSFDQKQQVLGELFERHNTVTIKQFVDNLLAHGDYDRIPEVRGLADEKRFLSSLSTYNQLKGILHEAIDDSDKQTDMVDCKINPNAVRTKKISFL

SEQ ID NO: 468 - protein, 236 aa, Lactobacillus casei
MFKDYLKQLEDDGTAKAIRQLYDRYIDGDDAKPFVREDFVKALTKEVTAHPNAKSPELLERLAQPDFMLKQRNKANGAIPVQMQQRELDQIIKNQSVYYDWLAAPNPVEKHRKSMPYQLDELLNFRIPYYVGPLVTAKEQKAARGGVFAWMVRKDPDGNITPYNFDEKVDREASANTFIQRMKTTDTYLIGEDVLPKQSLLYQSYEVLNELNNVRVNDNKLSSSIFKSSATMITNS

SEQ ID NO: 469 - protein, 1389 aa, Lactobacillus casei
MIIRTYELKTITTIAILKMFQLLTGGLSMTKLGKPYGIGVDIGSNSIGFAAVDENSHLIRLKGKTVIGARLFEEGKAAADRRASRTTRRRLSRNRWRLSFLRDFFESHITPTGPNFFMRQKYSEISPKDKARYKYEKRLFNDRTDAEFYQQYPTMYHLRNRLLTDPSKADVREIYFAIHHILKSRGHFLTSGYAKDFNTNKVALNEIFPALQDAYAQVYPDLDITFDENKVNEFKTVLLNEKATPSDTQRALVNLLLAEDGDKDILKQQKQVLTEFAKAVVGLKTKLNVALGTEVDSSEATVWNFSLGQLDDKWAGIESAMTDEGTEILDQIRDLYRARLLNGIVPAGKTLSQAKVDDYAQHHEDLELFKDYLKQLEDDGTAKAIRQLYDRYIDGDDAKPFVREDFVKALTKEVTAHPNAKSPELLERLAQPDFMLKQRNKANGAIPVQMQQRELDQIIKNQSVYYDWLAAPNPVEKHRKSMPYQLDELLNFRIPYYVGPLVTAKEQKAAQGGVFAWMVRKDPDGNITPYNFDEKVDREASANTFIQRMKTTDTYLIGEDVLPKQSLLYQRYEVLNELNNVRVNNEKLSIEQKQQVIRELFERHNSVTIKQFAENLRAHGDYAHIPEIRGLADEKRFLSSLSTYRQLKSLLPDAIDDPAKQADIENIIAWSTVFEDAAIFKTKLKEINWLDSQTITKLSNIRYRGWGQFSHKFLNGLTLGNGHTIIQELFLSNNNLMQILTDETLQKKMTELNADKLKAANINDAIDDAYTSPSNKKALRQVLRVIEDIKRAADGQDPSWLYVETADGGGTPGKRTRARQHQLQEIYANAAHELIDSAVRGELEDKIADKADFNDRLVLYFMQGGRDIYTGTPLNIDQLSSYDIDHILPQSLIKDNSLDNRVLVHAIINREKNATFASTIYAQKMNATWRQWHEAGLISGRKLRNLQMRPDQIDKYASGFVARQLVETRQIIKLTEQIVAAQYPETKIIAVKAGLSHQLREELEFPKNRDVNHYHHAFDAFLAARIGTYLLKRFPNLQAFFTYGKFKKADVKKLRGFNFIRDITHAEDKIVVKDTGEVIWDKKRDVDELDRIYNFKRMLITHEVHFEKADLFKQTVYGAKDSKEAGGKKQLISKKKGYPVDIYGGYTQETGSYLSVVRLTKKAMYAVVKVSTRDAAKLAVAKSISEQKENETLNDIIDEKLSKISKNGKITHELFEVVLPRVGQKTLFKNSKYNLFLVNSDTYMHNYQELWMPREYQKMWKDISLSKYGDAQTEDQLDQIFGFIVSQVNSYFNLYDINQFRKKLNDAADKFATLPMRDTDDMQGKIATIGQLLIGLQANAARSDLRNLDIKTPLGLLQIPNGISLDSDTSVVYQSPTGLLEREVHLSDL

SEQ ID NO: 470 - protein, 412 aa, Lactobacillus casei
MIKDNSLDNRVLVHPLVNREKDTIFASTRFAKQTNGMWRQWHAAGLISSRKLRNLQMRPDEIDKYASGFVARQLVETRQIIKLTEQIVADQYPDTKIIAVKAGLSSQLRKELDFPKNREVNHYHHAFDAFLAARIGTYLLKRYPNLEPFFTYGKFKKTEVKKLKSFNFIRDMTHAKDKIVAKETGEIVWDNASDINELDRIYNFKRMLITHEVRFETASLFKQTLYAAKNPKNRGGSRQLIPKKKGYLVDIYGGYTQETGSYLSVVRLTKKAMYAVVKVSTRDAAKLAVAKSISEQKENETLKKIIDGKLSKTSKKGKTTHQLFEIVLPRVGQKTLFKNSKYNQFLVNSDTYMHNYQELWMPREYQRMWKDILLSNHGDAQIEGQLDQIFKFIVSQVNSYFNLYDINQFRKK

SEQ ID NO: 471 - protein, 234 aa, Lactobacillus casei
MKVTKKTETIFKVVKIATSQVAALNKARSRSTAEELSVLTELLKPKFSKVGKNGKITDTPFEVVLPRVPREQLFYNAKYGFFMVNSDTMFHNFQEIWVSRSDQKILQQIRKAKIDYPNVDQDLDNLFHNLADQIVKYFDLYSIAGFKEKISQSQNTFNDLAVDDTDQSVGKITVINELLKGAQANGMTGSLKVLKISTPFGFTQDKSGVLTKDSSIIYQSPTGLFERSVRLTDL

SEQ ID NO: 472 - protein, 566 aa, Lactobacillus casei
MQILTDEVLKQKIAELNAHELKASGIYAAIDDAYTSPSNKKALRQVLSVIDDITNAAGQAPNWLYIETADGDGVPGKRTNSRQRKIQEIYVNAAQELITSSVRGELEDKIASRADFTDRLVLYFMQGGRDIYTGEPLNIDNLSSYDIDHILPQSLIKDNSLDNRVLVHPLVNREKDTIFASTRFAKQMNGMWRQWHAAGLISSRKLRNLQMRPDEIDKYASGFVARQLVETRQIIKLTEQIVADQYPDAKIIAVKAGLSSQLRKELDFPKNREVNHYHHAFDAFLAARIGTYLLKRYPNLEPFFTYGKFKKTEVKKLKSFNFIRDMTHAKDKIVAKETGEIVWDNASDINELDRIYNFKRMLITHEVRFETASLFKQTLYAAKNSKNRGGSRQLIPKKKGYLVDIYGGYTQETGSYLSVVRLTKKAMYAVVKVSTRDAAKLAVAKSISEQKENETLKKIIDGKLSKTSKKGKTTHQLFEIVLPRVGQKTLFKNSKYNQFLVNSDTYMHNYQELWMPREYQRMWKDILLSNHGDAQLEGQLDQIFKFIVSQVNSYFNLYDINQFRKK

SEQ ID NO: 473 - protein, 1363 aa, Lactobacillus casei
MTKLGKPYGIGVDIGSNSIGFAAVDENSHLIRLKGKTVIGARLFEEGKAAADRRASRTTRRRLSRNRWRLSFLRDFFESHITPTDPNFFMRQKYSEISPKDKARYKYEKRLFNDRTDAEFYQQYPTMYHLRNRLLTDPSKADVREIYFAIHHILKSRGHFLTSGYAKDFNTNKVALNEIFPALQDAYAQVYPDLDITFDENKVNEFKTVLLDEKATPSDTQRALVNLLLAEDGDKDILKQQKQVLTEFAKAVVGLKMKLNVALGTEVDSSEATAWNFSLGQLDDKWAGIESAMTDEGTEILDQIRDLYRARLLNGIVPAGKTLSQAKVDDYEQHHEDLELFKDYLKQLEDDGMAKVIRQLYDRYIDGDDAKPFVREDFVKALTKEVTAHPNAKSPELLERLVQPDFMLKQRNKANGAIPVQMQQRELDQIIKNQSVYYDWLAAPNPVEKHRQSMPYQLDELLNFRIPYYVGPLVTAKEQKAAQGGVFAWMVRKDPDGNITPYNFDEKVDREASANTFIQRMKTTDTYLIGEDVLPKQSLLYQSYEVLNELNNVRVNDNKLSFDQKQQVLGELFERHNTVTIKQFVDNLLAHGDYDRIPEVRGLADEKRFLSSLSTYNQLKGILHEAIDDSDKQTDIEKIIAWSTIFEDKAIFKTKLNEISWLTAGMINSLANIRYRGWGQFSHKLLNELTLSTGRTVFEELLISSHNLMQILTDEVLKQKIAELNAHELKASGIYAAIDDAYTSPSNKKALRQVLSVIDDITNAAGQAPNWLYIETADGDGVPGKRTNSRQRKIQEIYANAAQELITGSVRGELEDKIASRADFTDRLVLYFMQGGRDIYTGEPLNIDNLSSYDIDHILPQSLIKDNSLDNRVLVHPLVNREKDTIFASTRFAKQMNGMWRQWHAAGLISSRKLRNLQMRPDEIDKYASGFVARQLVETRQIIKLTEQIVADQYPDAKIIAVKAGLSSQLRKELDFPKNREVNHYHHAFDAFLAARIGTYLLKRYPNLEPFFTYGKFKKTEVKKLKSLKSFNFIRDMTHAKDKIVAKETGEIVWDNASDINELDRIYNFKRMLITHEVRFETASLFKQTLYAAKNSKNRGGSRQLIPKKKGYLVDIYGGYTQETGSYLSVVRLTKKAMYAVVKVSTRDAAKLAVAKSISEQKENETLKKIIDGKLSKTSKKGKTTHQLFEIVLPRVGQKTLFKNSKYNQFLVNSDTYMHNYQELWMPREYQRMWKDILLSNHGDAQLEGQLDQIFKFIVSQVNSYFNLYDINQFRKKIADATDKFAKLPTHDTDNARGKIATIGQLLIGLQANAMRSDLRNLDIKTPFGLLQIGTGITLDLDTSIIYQSPTGLFEREVPLTDL

SEQ ID NO: 474 - protein, 1360 aa, Lactobacillus casei
MTKLGKPYGIGVDIGSNSIGFAAVDENSHLIRLKGKTVIGARLFEEGKAAADRRASRTTRRRLSRNRWRLSFLRDFFESHITPTDPNFFMRQKYSEISPKDKARYKYEKRLFNDRTDAEFYQQYPTMYHLRTRLLTDPSKADVREIYFAIHHILKSRGHFLTPGYAKDFNTNKVALNEIFPALQDAYAQVYPDLDITFDENKVNEFKTVLLNEKATPSDTQRALVNLLLAEDGDKDILKQQKQVLTEFAKAVVGLKTKLNVALGTEVDSSEATVWNFSLGQLDDKWAGIESAMTDEGTEILDQIRDLYRARLLNGIVPAGKTLSQAKVDDYAQHHEDLELFKDYLKQLEDDGTAKAIRQLYDRYIDGDDAKPFVREDFVKALTKEVTAHPNAKSPELLERLAQPDFMLKQRNKANGAIPVQMQQRELDQIIKNQSVYYDWLAAPNPVEKHRKSMPYQLDELLNFRIPYYVGPLVTAKEQKAAQGGVFAWMVRKDPDGNITPYNFDEKVDREASANTFIQRMKTTDTYLIGEDVLPKQSLLYQSYEVLNELNNVRVNDNKLSFDQKQQVLGELFERHNTVTIKQFVDNLLAHGDYDRIPEVRGLADEKRFLSSLSTYNQLKGILHEAIDDADKQTDIENIIAWSTIFEDKAIFKTKLNEISWLNAGMINSLANIRYRGWGQFSHKLLNELTLSTGRTVFEELLISSRNLMQILTDEVLKQKIAELNAHELKASGIYAAIDDAYTSPSNKKALRQVLSVIDDITNAAGQAPNWLYIETADGDGVPGKRTNSRQRKIQEIYANAAQELITGSVRGELEDKIASRADFTDRLVLYFMQGGRDIYTGEPLNIDNLSSYDIDHILPQSLIKDNSLDNRVLVHPLVNREKDTIFASTRFAKQMNGMWRQWHAAGLISSRKLRNLQMRPDEIDKYASGFVARQLVETRQIIKLTEQIVADQYPDTKIIAVKAGLSSQLRKELDFPKNREVNHYHHAFDAFLAARIGTYLLKRYPNLEPFFTYGKFKKTEVKKLKSFNFIRDMTHAKDKIVAKETGEIVWDNASDINELDRIYNFKRMLITHEVRFETASLFKQTLYAAKNSKNRGGSRQLIPKKKGYLVDIYGGYTQETGSYLSVVRLTKKAMYAVVKVSTRDAAKLAVAKSISEQKENETLKKIIDGKLSKTSKKGKTTHQLFEIVLPRVGQKTLFKNSKYNQFLVNSDTYMHNYQELWMPREYQRMWKDILLSNHGDAQLEGQLDQIFKFIVSQVNSYFNLYDINQFRKKIADATDKFAKLPTHDTDNARGKIATIGQLLIGLQANAMRSDLRNLDIKTPFGLLQIGTGITLDLDTSIIYQSPTGLFEREVPLTDL

SEQ ID NO: 475 - protein, 700 aa, Lactobacillus casei
MTKLGKPYGIGVDIGSNSIGFAAVDENSHLIRLKGKTVIGARLFEEGKAAADRRASRTTRRRLSRNRWRLSFLRDFFESHITPTDPNFFMRQKYSEISPKDKARYKYEKRLFNDRTDAEFYQQYPTMYHLRTRLLTDPSKADVREIYFAIHHILKSRGHFLTSGYAKDFNTNKVALNEIFPALQDAYAQVYPDLDITFDENKVNEFKTVLLDEKATPSDTQRALVNLLLAEDGDKDILKQQKQVLTEFAKAVVGLKTKLNVALGTEVDSSEATAWNFSLGQLDDKWAGIESAMTDEGTEILDQIRDLYRARLLNGIVPAGKTLSQAKVDDYEQHHEDLELFKDYLKQLEDDGMAKAIRQLYDRYIDGDDAKPFVREDFVKALTKEVTAHPNAKSPELLERLVQPDFMLKQRNKANGAIPVQMQQRELDQIIKNQSVYYDWLAAPNPVEKHRQSMPYQLDELLNFRIPYYVGPLVTAKEQKAAQGGVFAWMVRKDPDGNITPYNFDEKVDREASANTFIQRMKTTDTYLIGEDVLPKQSLLYQSYEVLNELNNVRVNDNKLSFDQKQQVLGELFERHNTVTIKQFVDNLLAHGDYDRIPEVRGLADEKRFLSSLSTYNQLKGILHEAIDDSDKQTDIEKIIAWSTIFEDKAIFKTKLNEISWLNAGMINSLANIRYRGWGQFSHKLLNELTLSTGRTVFEA

SEQ ID NO: 476 - protein, 330 aa, Lactobacillus casei
MTKLGKPYGIGVDIGSNSIGFAAVDENSHLIRLKGKTVIGARLFEEGKAAADRRASRTTRRRLSRNRWRLSFLRDFFESHITPTDPNFFMRQKYSEISPKDKNRYKYEKRLFNDRTDAEFYQQYPTMYHLRNRLLTDPSKADVREIYFAIHHILKSRGHFLTPGDAKDFNTNKVALNEIFPALQDAYAQVYPDLDITFDENKMNEFKTVLLNEKATPSDTQRALVNLLLAEDGDKDILKQQKQVLTEFAKAVVGLKTKLNVALGTEVDSSEATAWNFSLGQLDDKWAGIESAMTDEGTEILDQIRDLYRARLLNGIVPAGKTLSQAKVDD

SEQ ID NO: 477 - protein, 330 aa, Lactobacillus casei
MTKLGKPYGIGVDIGSNSIGFAAVDENSHLIRLKGKTVIGARLFEEGKAAADRRASRTTRRRLSRNRWRLSFLRDFFESHITPTDPNFFMRQKYSEISPKDKNRYKYEKRLFNDRTDAEFYQQYPTMYHLRNRLLTDPSKADVREIYFAIHHILKSRGHFLTPGDAKDFNTNKVALNEIFPALQDAYAQVYPDLDITFDENKMNEFKTVLLNEKATPSDTQRALVNLLLAEDGDKDILKQQKQVLTEFAKAVVGLKTKLNVALGTEVDSSEATAWNFSLGQLDDKWAGIESAMTDEGTEILDQIRDLYRARLLNGIVPAGKTLSHAKVDD

SEQ ID NO: 478 - protein, 1361 aa, Lactobacillus casei
MTKLGKPYGIGVDIGSNSIGFAAVDENSHLIRLKGKTVIGARLFEEGKAAADRRASRTTRRRLSRNRWRLSFLRDFFESHITPTGPNFFMRQKYSEISPKDKARYKYEKRLFNDRTDAEFYQQYPTMYHLRNRLLTDPSKADVREIYFAIHHILKSRGHFLTSGYAKDFNTNKVALNEIFPALQDAYAQVYPDLDITFDENKVNEFKTVLLNEKATPSDTQRALVNLLLAEDGDKDILKQQKQVLTEFAKAVVGLKTKLNVALGTEVDSSEATVWNFSLGQLDDKWAGIESAMTDEGTEILDQIRDLYRARLLNGIVPAGNTLSQAKVDDYAQHHEDLELFKDYLKQLEDDGTAKAIRQLYDRYIDGDDAKPFVREDFVKALTKEVTAHPNAKSPELLERLAQPDFMLKQRNKANGAIPVQMQQRELDQIIKNQSVYYDWLAAPNPVEKHRKSMPYQLDELLNFRIPYYVGPLVTAKEQKAAQGGVFAWMVRKDPDGNITPYNFDEKVDREASANTFIQRMKTTDTYLIGEDVLPKQSLLYQRYEVLNELNNVRVNNEKLSIEQKQQVIRELFERHNSVTIKQFAENLRAHGDYAHIPEIRGLADEKRFLSSLSTYRQLKSLLPDAIDDPAKQADIENIIAWSTVFEDAAIFKTKLKEINWLDSQTITKLSNIRYRGWGQFSHKFLNGLTLGNGHTIIQELFLSNNNLMQILTDETLQKKMTELNADKLKAANINDAIDDAYTSPSNKKALRQVLRVIEDIKRAADGQDPSWLYVETADGGGTPGKRTRARQHQLQEIYANAAHELIDSAVRGELEDKIADKADFNDRLVLYFMQGGRDIYTGTPLNIDQLSSYDIDHILPQSLIKDNSLDNRVLVHAIINREKNATFASTIYAQKMNATWRQWHEAGLISGRKLRNLQMRPDQIDKYASGFVARQLVETRQIIKLTEQIVAAQYPETKIIAVKAGLSHQLREELEFPKNRDVNHYHHAFDAFLAARIGTYLLKRFPNLQAFFTYGKFKKADVKKLRGFNFIRDITHAEDKIVVKDTGEVIWDKKRDVDELDRIYNFKRMLITHEVHFEKADLFKQTVYGAKDSKEAGGKKQLISKKKGYPVDIYGGYTQETGSYLSVVRLTKKAMYAVVKVSTRDAAKLAVAKSISEQKENETLNDIIDEKLSKISKNGKITHELFEVVLPRVGQKTLFKNSKYNLFLVNSDTYMHNYQELWMPREYQKMWKDISLSKYGDAQTEDQLDQIFGFIVSQVNSYFNLYDINQFRKKLNDAADKFATLPMRDTDDMQGKIATIGQLLIGLQANAARSDLRNLDIKTPLGLLQIPNGISLDSDTSVVYQSPTGLLEREVHLSDL

SEQ ID NO: 479 - protein, 1128 aa, Lactobacillus casei
MTKLGKPYGIGVDIGSNSIGFAAVDENSHLIRLKGKTVIGARLFEEGKAAAKRRAGRTTRRRLSRNRWRLSFLRDFFESHITPTDPNFFMRQKYSEISPKDKARYKYEKRLFNDRTDAEFYQQYSTMYHLRNRLMTDPSRADVREIYFAIHHILKSRGHFLTPGDAKDFNTNDVALDEIFPALQDAYAQVYPDLGITFDEDKANEFKTILLNEIATSIDTQRALVKLLLAEEDDKDILKQQKQVLTEFAKAVVGLKTKLNLALGTEVDSSEATAWNFSLGQLDDKWAGIESAMTDEGTEILDQIRDLYRARLLNGIVPTGKTLSQAKVDDYTQHHEDLQLFKAYLKQLEDDGTAKAIRQLYDRYIDGDDAAPFLRENFVKALTKDVTAHPNTKSPELLERLAQPDFMLKQRNKANGAIPVQMQQRELDQIIKNQAVYYDWLAAPNPVEKHRKSMPYQLDELLNFRIPYYVGPLVTAKEQKAAQGGVFAWMVRKDPEGNITPYNFDEKVDREASANTFIQRMKTTDTYLIGEDVLPKQSLLYQRYEVLNELNNVRVNNEKLSIEQKQQVIRELFERHNSVTIKQFAENLRAHGDYAHIPEIRGLADEKRFLSSLSTYRQLKSLLPEAIDDPAKQADIENIIAWSTVFEDAAIFKTKLKEISWLGSEAITKLSNIRYRGWGQFSRKFLNGLTLGNGHTIIQELLLSTNNLMQILTDETLQKKMTELNADKLKTANINDAIDNAYTSPSNKKALRQVLRVVDDIKRAADGQDPSWLYVETADGGGTPGKRTRARQHQLQEIYANAAHELIDTAVRGELEDKISDKADFNDRLVLYFMQGGRDIYTGAPLNIDQLSSYDIDHILPQSLIKDNSLDNRVLVHAIINREKNATFASTIYAQKMNATWRQWHEAGLISGRKLRNLQMRPDQIDKYASGFVARQLVETRQIIKLTEQIVAAQYPDTKIIAVKAGLSHQLREELEFPKNRDVNHYHHAFDAFLAARIGTYLLKRFPNLQAFFTYGKFTKADVKKLRGFNFIRDITHAEDKIVAKDTGEVVWDKQRDVDELDRIYNFKRMLITHEVRFETADLFKQTVYGARDSKEAGGSKQLIPKKKDIQLIFMGAISERTRPILPL

SEQ ID NO: 480 - protein, 1366 aa, Lactobacillus casei
MTKLGKPYGIGVDIGSNSIGFAAVDENSHLIRLKGKTVIGARLFEEGKAAAYRRASRTTRRRLSRNRWRLSFLRDFFESHITPTDPNFFMRQKYSEISPKDKARYKYEKRLFNDRTDAEFYQQYPTMYHLRTRLLTDPSKADVREIYFAIHHILKSRGHFLTPGYAKDFNTNKVALNEIFPALQDAYAQVYPDLDITFDENKVNEFKTVLLNEKATPSDTQRALVNLLLAKEGDRDILKQQKQVLTEFAKAVVGLKTKLNVALGTEVDSSEATAWNFSLGQLDDKWAGIESAMTDEGTEILDQIRDLYRARLLNGIVPAGKTLSQAKVDDYAQHHEDLELFKDYLKQLEDDGTAKAIRQLYDRYIDGDDAKPFVREDFVKALTKEVTAHPNAKSPELLERLAQPDFMLKQRNKANGAIPVQMQQRELDQIIKNQAVYYDWLAAPNPVEKHRQSMTYQLDELLNFRIPYYVGPLVTAKEQKAAQGGVFAWMVRKDPDGNITPYNFDEKVDREASANTFIQRMKTTDTYLIGEDVLPKQSLLYQSYEVLNELNNVRVNDNKLSFDQKQQVLGELFERHNTVTIKQFVDNLLAHGDYDRIPEVRGLADEKRFLSSLSTYNQLKGILHEAIDDADKQTDIENIIAWSTIFEDKAIFKTKLNEISWLNAGMINSLANIRYRGWGQFSHKLLNELTLSTGRTVFEELLISSRNLMQILTDEVLKQKIAELNAHELKASGIYAAIDDAYTSPSNKKALRQVLSVIDDITNAAGQAPNWLYIETADGDGVPGKRTNSRQRKIQEIYANAAQELITGSVRGEFEDKIASRADFTDRLVLYFMQGGRDIYTGEPLNIDNLSSYDIDHILPQSLIKDNSLDNRVLVHPLVNREKDTIFASTRFAKQMNGMWRQWHAAGLISSRKLRNLQMRPDEIDKYASGFVARQLVETRQIIKLTEQIVADQYPDTKIIAVKAGLSSQLRKELDFPKNREVNHYHHAFDAFLAARIGTYLLKRYPNLEPFFTYGKFKKTEVKKLKSLKSLKSFNFIRDMTHAKDKIVAKETGEIVWDNASDINELDRIYNFKRMLITHEVRFETASLFKQTLYAAKNSKNRGGSRQLIPKKKGYLVDIYGGYTQETGSYLSVVRLTKKAMYAVVKVSTRDAAKLAVAKSISEQKENETLKKIIDGKLSKTSKKGKTTHQLFEIVLPRVGQKTLFKNSKYNQFLVNSDTYMHNYQELWMPREYQRMWKDILLSNHGDAQIEGQLDQIFKFIVSQVNSYFNLYDINQFRKKIADATDKFAKLPTHDTDNARGKIATIGQLLIGLQANAMRSDLRNLDIKTPFGLLQIGTGITLDLDTSIIYQSPTGLFEREVPLTDL

SEQ ID NO: 481 - protein, 1354 aa, Lactobacillus coryniformis
MTLHYNVGLDIGTNSVGYTIVDDNGKILQVKGKNGYGVRVFKEGATAAERRIFRTTHRRLKRRKWRLRLLQDFFEPYILPQDDGFFIRRKESNLVLNDRDEDTASLFNDRSDRDFYQAYPTIYHLRQALMTEKRQFDVREIYLAMHHIIKYRGHFLLNGTVNNFTNNKIDLHSDFEELNALLLNVIPELKFQIDLDHSTMFQTTLLNTTISRSGRQRDLVKSFYNGSDDKQLAKQQKSVATELLKAILGLKAKFHKLFNLDLLETTEWEFSFDAEDIDDKLAKLEPLMTENQQQVMDILQRIFAAITLNGIVPEGKTLSASKVDSYQKHKQDLKLLKAIAQHSDKKTATVLQTAYNEYINGIASKPLKQEDFYKRLTNAVKKSSDPQVADMLALIDQEKFLPKQRTKENGAIPHQLHQLELERIIDNQKDYYPWLAELNPNQARQKVAKYKLSELVAFRVPYYVGPLIEPEVQQATSNAHFAWMARKEAGPITPWNFDQKVDRNVSAERFIKRMTTKDTYLLAEDVLPLHSLLYQRFIVLNELNNVRVNGQKLTKKQKQAVYQDLFKRQPHVTKKQFKSYLVQTGEFAESSKIEGLANETSFNSGLTTENELRKIFGAQLDEARYQVDFEQIIEWATLFEDAKILRTKLAEITWLTTEQIEKLAGIRYRGWGRFSRKLLAGLRDQNGQQIIDLLWDTPNNFMVIVSQAAFSEAITKENEKLIDRRGAQDVITDLYTSPQNKKALRQVLAIVADVQKAMGGVPPQRIFIEFAREDEKNPRRSVERSRQLEKLYQTISNEFLINSEVRQELKEAVDQKVNFKDRLFLYFLQGGVDLYSGKRINIDQLSHYDIDHILPQSFIKDDSLDNRVLVSQKLNRSKSDSVPLSEFANYKFGPAMQAKWLQLKEAGLLSKRKYDNLTLDPTKLSKFAPLGFVNRQLVETRQVIKLAANLLASEETKVVTIKANMTHQVRKELDFPKNRNVNNYHHAFDAYLTAFVGIFLSKRYPKLKPYFTYGDFQKGNKLPDLKNFNFLYELKNKDRSIDSNTGEIIWDKQRDLAYMNKIYNFKKVTVVHEVLTKSGALYNQTLYKASEDKASGRGTKQLIRKKDNMPTELYGGYTGSTSAFMSIVRLWKKDKPYYKVVGIPTRMAAKLANQAQLLDYLTKKFTTRKLVKKTGDYKTTVERFELVVPKVGFNQLVIDGGQPFMLGSATYQYNARELFISKEAVKALNKQLSTHVDLVQVFDEILVQVNRWFPLYDTNGFREKLSHGRDRFMKLNDSFEEKSDTQIDVLNRILIGFHANAARTNLKILGLGTDLGFMTQQAGIRLTEKAILVHQSPSGLFERKVALRDLKGLR

SEQ ID NO: 482 - protein, 544 aa, Lactobacillus crispatus
KYYLYFMQLGRDAYTGKPINIDEVSQYYDIDHILPQSFIKDDSLNNRVLVAKPINNGKSDGVPLKLFGDNLATGLGITVKQMWNNWADKGLINKAKQNNLFLDPENINKHQASGFIRKQLVETSQIIKLATTILQAEYPKTKIIVVKASSNHYLRNEFDLYKSREVNDYHHAIDAYLTTICGNLLYQAYPKLRPFFVYGQFKKFSSDPKKENEILKKTKNFDFVAKLLGSKAPNEIRSQQGKVLFEKNKIRLQLNKAYNYKYMLVSRDTTTKNQEMFGMTIYPRAERDIAKSRKLIEKRKGFSTDIYGGYTGTAAAYMAIVRINKTKSSQYKVIAVPMTKRAILNKAEKEGNYEKILKQILSPSILYNDKGKRKAGVISFDIIKGKVPYNQVVQDGNKKFLLKSAIYLCNAKQLVLSEEAMRVITGHWLDSDKQDQELLDVYDEILEKIDRYLPLFDIRDFRNKLHKGREKFLKLNAEDKFKAIIQILKGLHDNSDTGELKDIGITVPFGQLQNNSGITLSSDTILVYQSPTGLFEKRVKISSL

SEQ ID NO: 483 - protein, 298 aa, Lactobacillus crispatus
MDELNKISVNGKKLSVSVKQELYEDLFKKNNTVSAKQLKNWLIENQKLPYIKIKGLADQTKFNSSLSTYIKLKKSGLFVDKLDSNEFRDDFEKIIEWSTIFEDKQIYIQKLQTIDWLTAKQIQFLQNIRLQGWGRLSKKLLTAIVDSNGQNIIEQLWNSQQIFMSIVNKADIKGTITDANQDLMHSNSMEDILSEAYTSPANKKMIRQVVKVVHDIQKAASGQAPKQIAIEFARESRRNSKLSQTRGHKLQDIYQKISGDIVNKNLKDKLAEYIKNNQLSVWEKTSFQMNKNDQDFLF

SEQ ID NO: 484 - protein, 279 aa, Lactobacillus crispatus
MNGKKLSVSVKQELYEDLFKKNNTVSAKQLKNWLIENQKLPYIKIKGLADQTKFNSSLSTYIKLKKSGLFVDKLDSNEFRDDFEKIIEWSTIFEDKQIYIQKLQTIDWLTAKQIQFLQNIRLQGWGRLSKKLLTAIVDSNGQNIIEQLWNSQQIFMSIVNKADIKGTITDANQDLMHSNSMEDILSEAYTSPANKKMIRQVVKVVHDIQKAASGQAPKQIAIEFARESRRNSKLSQTRGHKLQDIYQKISGDIVNKNLKDKLAEYIKNNQLNKDKYYTR

SEQ ID NO: 485 - protein, 538 aa, Lactobacillus crispatus
MQLGRDAYTGKPINIDEVSQYYDIDHILPQSFIKDDSLNNRVLVAKPINNGKSDGVPLKLFGDNLATGLGITVKQMWNNWADKGLINKAKQNNLFLDPENINKHQASGFIRKQLVETSQIIKLATTILQAEYPKTKIIVVKASSNHYLRNEFDLYKSREVNDYHHAIDAYLTTICGNLLYQAYPKLRPFFVYGQFKKFSSDPKKENEILKKTKNFDFVAKLLGSKAPNEIRSQQGKVLFEKNKIRLQLNKAYNYKYMLVSRDTTTKNQEMFGMTIYPRAERDIAKSRKLIEKRKGFSTDIYGGYTGTAAAYMAIVRINKTKSSQYKVIAVPMTKRAILNKAEKEGNYEKILKQILSPSILYNDKGKRKAGVISFDIIKGKVPYNQVVQDGNKKFLLKSAIYLCNAKQLVLSEEAMRVITGHWLDSDKQDQELLDVYDEILEKIDRYLPLFDIRDFRNKLHKGREKFLKLNAEDKFKAIIQILKGLHDNSDTGELKDIGITVPFGQLQNNSGITLSSDTILVYQSPTGLFEKRVKISSL

SEQ ID NO: 486 - protein, 206 aa, Lactobacillus crispatus
MQLGRDAYTGKPINIDEVSQYYDIDHILPQSFIKDDSLNNRVLVAKPINNGKSDGVPLKLFGDNLATGLGITVKQMWNNWADKGLINKAKQNNLFLDPENINKHQASGFIRKQLVETSQIIKLATTILQAEYPKTKIIVVKASSNHYLRNEFDLYKSREVNDYHHAIDAYLTTICGNLLYQAYPKLRPFFVYGQFKKFSSDPKKRK

SEQ ID NO: 487 - protein, 857 aa, Lactobacillus crispatus
MTKLNNEYMVGLDIGTNSCGWVATDFDNNILKMHGKRALGSHLFDEGVSAADRRAFRTTRRRIKRRKWRLKLLEEIFDEEMAKVDPNFFARLKESGLSPLDTRKNVSSIVFPTKKMDKQFYKKFPTIYHLRNALMKQDKKFDLRAIYIAIHHIVKYRGNFLSNSSISNFSASKIEIDRFVNELNDLYSIFLPESGVIFDAGNASKVEDIIRNEQMFKLDKIKEIADVLPDTENKSGLKLSKKISKEISKAILGYKAKFEIILQVNVDKTDSSIWNFKLNDENADVNLSEITSDLTDTQLQILDLVRNLFSAISLLNIVDEGSTLSESMIRKYNDHAQDLKLLKTVIKNHSDRKKAHNLQLAYDKYVNNRHFVDVETKKAFPNKHLYRKSDFYEIVKKNLDASKEAVQIRKEIALDKFMPKQRSDENGVIPFQLNQIELDKIIENQGKYYPFLKEINPIKAHRMQAPYKLDELIRFRVPYYVGPMIEPTNSSYPQTRQNQSFAWMVRKAKGRITPWNFDEKVDRQKSANNFIKRLTTKDTYLFGEDVLPANSLLYQKYTVLDELNKISVNGKKLSVSVKQELYEDLFKKNNTVSAKQLKNWLIENQKLPYIKIKGLADQTKFNSSLSTYIKLKKSGLFVDKLDSNEFRDDFEKIIEWSTIFEDKQIYIQKLQTIDWLTAKQIQFLQNIRLQGWGRLSKKLLTAIVDSNGQNIIEQLWNSQQIFMSIVNKADIKGTITDANQDLMHSNSMEDILSEAYTSPANKKMIRQVVKVVHDIQKAASGQAPKQIAIEFARESRRNSKLSQTRGHKLQDIYQKISGDIVNKNLKDKLAEYIKNNQLSVWEKTSFQMNKNDQDFLF

SEQ ID NO: 488 - protein, 857 aa, Lactobacillus crispatus
MTKLNNEYMVGLDIGTNSCGWVATDFDNNILKMHGKRALGSHLFDEGVSAADRRAFRTTRRRIKRRKWRLKLLEEIFDEEMAKVDPNFFARLKESGLSPLDTRKNVSSIVFPTKKMDKQFYKKFPTIYHLRNALMKQDKKFDLRAIYIAIHHIVKYRGNFLSNSSISNFSASKIEIDRFVNELNDLYSIFLPESGVIFDAGNASKVEDIIRNEQMFKLDKIKEIADVLPDTENKSGLKLSKKISKEISKAILGYKAKFEIILQVNVDKTDSSIWNFKLNDENADVNLSEITSDLTDTQLQILDLVRNLFSAISLLNIVDEGSTLSESMIRKYNDHAQDLKLLKTVIKNHSDRKKAHNLQLAYDKYVNNRHFVDVETKKAFPNKHLYRKSDFYEIVKKNLDASKEAVQIRKEIALDKFMPKQRSDENGVIPFQLNQIELDKIIENQGKYYPFLKEINPIKAHRMQAPYKLDELIRFRVPYYVGPMIEPTNSSYPQTRQNQSFAWMVRKAKGRITPWNFDEKVDRQKSANNFIKRLTTKDTYLFGEDVLPANSLLYQKYTVLDELNKISVNGKKLSVSVKQELYEDLFKKNNTVSAKQLKNWLIENQKLPYIKIKGLADQTKFNSSLSTYIKLKKSGLFVDKLDSNEFRDDFEKIIEWSTIFEDKQIYIQKLQTIDWLTAKQIQFLQNIRLQGWGRLSKKLLTAIVDSNGQNIIEQLWNSQQIFMSIVNKADIKGTITDANQDLMHSNSMEDILSEAYTSPANKKMIRQVVKVVHDIQKAASGQAPKQIAIEFARESRRNSKLSQTRGHKLQDIYQKISGDIVNKNLKDKLAEYIKNNQLSVWEKNSFQMNKNDQDFLF

SEQ ID NO: 489 - protein, 347 aa, Lactobacillus crispatus
MVNLKSLVLILKKENEILKKTKNFDFVAKLLGSKAPNEIRSQQGKVLFEKNKIRLQLNKAYNYKYMLVSRDTTTKNQEMFGMTIYPRAERDIAKSRKLIEKRKGFSTDIYGGYTGTAAAYMAIVRINKTKSSQYKVIAVPMTKRAILNKAEKEGNYEKILKQILSPSILYNDKGKRKAGVISFDIIKGKVPYNQVVQDGNKKFLLKSAIYLCNAKQLVLSEEAMRVITGHWLDSDKQDQELLDVYDEILEKIDRYLPLFDIRDFRNKLHKGREKFLKLNAEDKFKAIIQILKGLHDNSDTGELKDIGITVPFGQLQNNSGITLSSDTILVYQSPTGLFEKRVKISSL

SEQ ID NO: 490 - protein, 534 aa, Lactobacillus crispatus
RDAYTDKPINIDEVSQYYDIDHILPQSFIKDDSLNNRVLVAKPINNGKSDGVPLKLFGDNLATGLGITVKQMWNNWADKGLINKAKQNNLFLDPENINKHQASGFIRKQLVETSQIIKLATTILQAEYPKTKIIVVKASSNHYLRNEFDLYKSREVNDYHHAIDAYLTTICGNLLYQAYPKLRPFFVYGQFKKFSSDPKKENEILKKTKNFDFVAKLLGSKAPNEIRSQQGKVLFEKNKIRLQLNKAYNYKYMLVSRDTTTKNQEMFGMTIYPRAERDIAKSRKLIEKRKGFSTDIYGGYTGTAAAYMAIVRINKTKSSQYKVIAVPMTKRAILNKAEKEGNYEKILKQILSPSILYNDKGKRKAGVISFDIIKGKVPYNQVVQDGNKKFLLKSAIYLCNAKQLVLSEEAMRVITGHWLDSDKQDQELLDVYDEILEKIDRYLPLFDIRDFRNKLHKGREKFLKLNAEDKFKAIIQILKGLHDNSDTGELKDIGITVPFGQLQNNSGITLSSDTILVYQSPTGLFEKRVKISSL

SEQ ID NO: 491 - protein, 278 aa, Lactobacillus crispatus
SVNGKKLSVSVKQELYEDLFKKNNTVSAKQLKNWLIENQKLPYIKIKGLADQTKFNSSLSTYIKLKKSGLFVDKLDSNEFRDDFEKIIEWSTIFEDKQIYIQKLQTIDWLTAKQIQFLQNIRLQGWGRLSKKLLTAIVDSNGQNIIEQLWNSQQIFMSIVNKADIKGTITDANQDLMHSNSMEDILSEAYTSPANKKMIRQVVKVVHDIQKAASGQAPKQIAIEFARESRRNSKLSQTRGHKLQDIYQKISGDIVNKNLKDKLAEYIKNNQLNKDKYY

SEQ ID NO: 492 - protein, 277 aa, Lactobacillus crispatus
SVNGKKLSVSVKQELYEDLFKKNNTVSAKQLKNWLIENQKLPYIKIKGLADQTKFNSSLSTYIKLKKSGLFVDKLDSNEFRDDFEKIIEWSTIFEDKQIYIQKLQTIDWLTAKQIQFLQNIRLQGWGRLSKKLLTAIVDSNGQNIIEQLWNSQQIFMSIVNKADIKGTITDANQDLMHSNSMEDILSEAYTSPANKKMIRQVVKVVHDIQKAASGQAPKQIAIEFARESRRNSKLSQTRGHKLQDIYQKISGDIVNKNLKDKLAEYIKNNQLNKDKY

SEQ ID NO: 493 - protein, 1368 aa, Lactobacillus curvatus
MSRPYNIGLDIGTSSIGWSVVDDQSKLVSVRGKYGYGVRLYDEGQTAAERRSFRTTRRRLKRRKWRLGLLREIFEPYITPIDDTFFLRQKQSNLSPKDQRKLYTQTSLFNDRTDRAFYDDYPTIYHLRYRLMTEKRQFDIREIYLAMHHIVKYRGHFLNEAPVSSFKSSEINLVAHFDRLNTIFADLFSESGFQLETDKLAEVKALLLDNQQSASNRQRQALSLIYTPSTNKAVEKQNKAIATELLKAILGLKAKFNVLTGIEAEDVKAWTLTFNAENFDEEMVKLESSLDDNAHQIIESLQELYSGVLLAGIVPENQSLSQAMITKYDDHQKHLKMLKAVREALAPGDRQRLKQAYDQYVDGQENTKAYSKEDFYGDITKALKNNPDHPIVSEIKKLIELDQFMPKQRTKDNGAIPHQLHQQELDRIIENQQQYYPWLAELNPNSKRQTVAKYKLDELVAFRVPYYVGPLITAEQQRQSSDAKFAWLIRKAEGRITPWNFDDKVDRQASANEFIKRMTTTDTYLLAEDVLPKQSLIYQRFEVLNELNGLKIDDQPITTELKQAIFTDLFMQKISVTVKNIQDYLVSEKRYASRPAITGLSDENKFNSRLSTYHDLKMIVGDAVDDVDKQADLEKCIEWSTIFEDGKIYSAKLNEIDWLTDQQRVQLAAKRYRGWGRLSAKLLTQIVNANGQRIMDLLWDTTDNFMRIVHSEDFDKLITEANQMMLAENDVQDVINDLYTSPQNKKALRQILLVVNDIQKAMKGQAPERILIEFAREDEVNSRLSVQRKRQVEQVYQNISNELLNNTEIRNELKDLSNSALSNTRLFLYFMQGGRDMYTGDSLNIDRLSTYDIDHILPQSFIKDNSLDNRVLVSQKMNRSKADQVPTDFTSVELGQKMQIQWEQMLRAGLITKKKYDNLTLNPDHISKYAMKGFINRQLVETRQVIKLATNLLMEQYGEDNIELITVKSGLTHQMRTEFDFPKNRNLNNHHHAFDAYLTAFVGLYLLKRYPKLKPYFVYGEYQKASQQDKWRNFNFLNGLKKDELVDENTEAVIWDKESGLAYLNKIYQFKKILVTRGVHENSGALFNQTLYAAKDDKASGQGGKQLIPAKQDRSTALYGGYSGKTVAYMCIVRIKNKKGDLYKVCGVETSWLAQLKQLTDEDSQKAFLEQKISPQFTKVKKQKGNIIEAVEEFEVIAPHILINQRFFDNGQELTLGSATYKHNEQELILDKTAVKLLNGALPLTQSEELAEQVYDEILDQVMHYFPLYDTNQFRAKLSTGKAAFMKLPWKSQWDGNKMVQVGQQVILDRILIGLHANAAMSDLKVLKMTTPFGMIQQSTGITLSADTQIIYQSPTGLFERRVALRDL

SEQ ID NO: 494 - protein, 669 aa, Lactobacillus delbrueckii
MAKPKDYTIGLDIGTNSVGWVVTDDQNNILRIKGKKAIGARLFTEGKVAAERRSFRTTRRRLSRRRWRIKMLEELFDEEIAKVDPSFFARLHESWISPKDKRKRYSAIVFPSPEEDKKFHESYPTIYHLRDKLMKDDQKHDIREIYIAVHQMIKARGNFLHDESVETYRSGMSSLGGRSERNILSVQTLEELNDLFAENEGTEEVELNVASAEQINDILTGGHLNADSQKEISNLLLPSSFPSFDDKAKEKQVKKLINNVATNISKAWLGYKADFSTILNLAKVDKDQKKIFAFALQGGDEEDKVQELESLLEQSQTDIVDRLIEIRHAIVLSEIVPVGMTLSEAMIDKYDQHKEDLITLKAVIRNTKDKKKAAKLQAIYDLYVKKRHADLAKAMKLTGIKKRSELLDPEELKKGISSLLDDSPEAVEIKQRLEEKTFLPLQRSNNNGVIPNQLHQVELDEIIKKQSKYYPFLAEKNPDESEEAQKKAPTKLDALLTFRVPYYVGPMITKEEQEAQNGHSFAWMVRRDPQDHEAITPWNFEKKVDKMASATQFIKRMTTKDTYLLGEDVLPASSLKYQLFTVLNELNNLRVNGKKLTSDEKEQVIEGLFKKQKTVKADKFVKYWQAKHIGADIKVKGLSDPSKFNSTMSTYIDFKKIFGDQLNDVNRQR

SEQ ID NO: 495 - protein, 544 aa, Lactobacillus delbrueckii
MTGCADYDVDHIMPQSFVKDDSLDNRVLVARAVNNQKSDKVPALLFGNKVVADLGITVREMWDKWQKLGMISKRKLSNLLTDPDALTEYRAQGFIRRQLVETSQVIKLTATILQSEFPDSKIIEVPAKYNSIVRKQFDLYKSREVNDFHHAIDAYLSTIVGNYLYQVYPNLRRMFVYGEFKKFSSNAEESAHDVARRVKSMNFLDDLLRGTHGDNIYCRSTGEIVFNRNDIISKLKQAYSFKQMLVTQEVFTKKSALFDQTVYPSPERDSKKRSGLIPRKKGMDTEIYGGYSGNKDAYFVLAEAVKEKGHTLQIVGVPIRALNTLKNSANYSEKLLEIIKPQVMFNKDTGKPIKGIKDVKILMDKIPCRQPVLEGESYYMLASSKYRYSLKQISLSQMSMKYILDYIDDPNFNKHEMINIDQQDEKECLLSVYDEILEKMDKYLPLFDIRSFRKKLHDGRDAFIALPVASEEKKPGEVDVIRKILKGLHANADITNLAELGFGTAALGALVSTGGIKISDDAVFIYQSPTGLFERRVKVSDLLK

SEQ ID NO: 496 - protein, 1356 aa, Lactobacillus farciminis
MTKKEQPYNIGLDIGTSSVGWAVTNDNYDLLNIKKKNLWGVRLFEEAQTAKETRLNRSTRRRYRRRKNRINWLNEIFSEELAKTDPSFLIRLQNSWVSKKDPDRKRDKYNLFIDGPYTDKEYYREFPTIFHLRKELILNKDKADIRLIYLALHNILKYRGNFTYEHQKFNISNLNNNLSKELIELNQQLIKYDISFPDDCDWNHISDILIGRGNATQKSSNILKDFTLDKETKKLLKEVINLILGNVAHLNTIFKTSLTKDEEKLNFSGKDIESKLDDLDSILDDDQFTVLDAANRIYSTITLNEILNGESYFSMAKVNQYENHAIDLCKLRDMWHTTKNEEAVEQSRQAYDDYINKPKYGTKELYTSLKKFLKVALPTNLAKEAEEKISKGTYLVKPRNSENGVVPYQLNKIEMEKIIDNQSQYYPFLKENKEKLLSILSFRIPYYVGPLQSAEKNPFAWMERKSNGHARPWNFDEIVDREKSSNKFIRRMTVTDSYLVGEPVLPKNSLIYQRYEVLNELNNIRITENLKTNPIGSRLTVETKQRIYNELFKKYKKVTVKKLTKWLIAQGYYKNPILIGLSQKDEFNSTLTTYLDMKKIFGSSFMEDNKNYDQIEELIEWLTIFEDKQILNEKLHSSKYSYTPDQIKKISNMRYKGWGRLSKKILMDITTETNTPQLLQLSNYSILDLMWATNNNFISIMSNDKYDFKNYIENHNLNKNEDQNISDLVNDIHVSPALKRGITQSIKIVQEIVKFMGHAPKHIFIEVTRETKKSEITTSREKRIKRLQSKLLNKANDFKPQLREYLVPNKKIQEELKKHKNDLSSERIMLYFLQNGKSLYSEESLNINKLSDYQVDHILPRTYIPDDSLENKALVLAKENQRKADDLLLNSNVIDRNLERWTYMLNNNMIGLKKFKNLTRRVITDKDKLGFIHRQLVQTSQMVKGVANILDNMYKNQGTTCIQARANLSTAFRKALSGQDDTYHFKHPELVKNRNVNDFHHAQDAYLASFLGTYRLRRFPTNEMLLMNGEYNKFYGQVKELYSKKKKLPDSRKNGFIISPLVNGTTQYDRNTGEIIWNVGFRDKILKIFNYHQCNVTRKTEIKTGQFYDQTIYSPKNPKYKKLIAQKKDMDPNIYGGFSGDNKSSITIVKIDNNKIKPVAIPIRLINDLKDKKTLQNWLEENVKHKKSIQIIKNNVPIGQIIYSKKVGLLSLNSDREVANRQQLILPPEHSALLRLLQIPDEDLDQILAFYDKNILVEILQELITKMKKFYPFYKGEREFLIANIENFNQATTSEKVNSLEELITLLHANSTSAHLIFNNIEKKAFGRKTHGLTLNNTDFIYQSVTGLYETRIHIE

SEQ ID NO: 497 - protein, 1313 aa, Lactobacillus fermentum
MHYLDEIFAPHLQEVDENFLRRLKQSNIHPEDPAKNQAFIGKLLFPDLLKKNERGYPTLIKMRDELPVEQRAHYPVTNIYKLREAMINEDRQFDLREVYLAVHHIMKYRGHFLNNASVDKFKVGRIDFYKSFNVLNEAYEELQNGEGSFTIEPSKVEKIGQLLLDTKMRKLNRQKAVAKLLEVKVADKEETKRNKQIATAMSKLVLGYKADFATVAMANGNEWKIDLSSETSEDEIEKFREELSDAQNDILTEITSLFSQIMLNEIVPNGMSISESMMDRYWTHERQLAEVKEYLATQPASARKEFDQVYNKYIGQAPKERGFDLEKGLKKILSKKENWKEIDELLKAGDFLPKQRTSANGVIPHQMHQQELDRIIEKQAKYYPWLATENPATGERDRHQAKYELDQLVSFRIPYYVGPLVTPEVQKATSGAKFAWAKRKEDGEITPWNLWDKIDRAESAEAFIKRMTVKDTYLLNEDVLPANSLLYQKYNVLNELNNVRVNGRRLSVGIKQDIYTELFKKKKTVKVSDVASLVMAKTRGVNKPSVEGLSDPKKFNSNLATYLDLKSIVGDKVDDNRYQTDLENIIEWRSVFEDGEIFADKLTEVEWLTDQQRSALVKKRYKGWGRLSKKLLTGIVDENGQRIIDLMWNTDQNFMQIVNQPVFKEQIDQLNQKAITNDGMTLREWVESVLDGAYTSPQNKKAIWQVVRVVEDIVKAVGNAPKSISIEFARNEGNKGEITRSRRTQLQKLFEDQAHELVKDTSLTEELEKAPDLSDRYYLYFTQGGKDMYTGDPINFDEISTKYDIDHILPQSFVKDDSLDNRVLVSRAENNKKSDRVPAKLYAAKMKPYWNQLLKQGLITQRKFENLTMDVDQNIKYRSLGFVKRQLVETRQVIKLTANILGSMYQEAGTDIIETRAGLTKQLREEFDLPKVREVNDYHHAVDAYLTTFAGQYLNRRYPKLRSFFVYGEYMKFKHGSDLKLRNFNFFHELMEGDKSQGKVVDQQTGELITTRDEVAKSFDRLLNMKYMLVSKEVHDRSDQLYGATIVTAKESGKLTSPIEIKKKRPVDLYGAYTNGTSAFMTIIKFTGNKPKYKVIGVPTTSAVGLKRVGKPGSESYNQELHRIIKSNPKVKKDFEIVVPHVSYSQLIVDDDCKFTLASDTYQHPATQLVLSKESMEIIADDFKFVKENTATADEQLVRVFDEIVNQMNHYFTIFDQRSNRQKVTKARDKFVSLPTESEYEGAKKTQVGKTEVITNLLMGLHANSAQGDLKVLGLSTFGFFQSSGGLNLSEDAMIVYQSPTGLFERRICLKDI

SEQ ID NO: 498 - protein, 1327 aa, Lactobacillus florum
MTEQQQPYNIGLDIGTSSIGWAVTDQNDKLLHIRGHNGIGVRLFKEGESAAERRGFRTTRRRLSRRRWRLRFLDRIFDAELAKVDPNFLARLKQSNISPLDPNKQMFGNILFDDPQFDDQKFHQQYPTIYHLRSALAQPDAPQADVRLIYLALHHMIKFRGHFLNGAAVEKFHGGQLHLESEFQELNQIFSNQQRDHVQLQTSSLDEVATILKDNQRTPSDRQRELSARLFVPVDKTIDKENKKLATELLKAVLGLKAKFDVILGVEATDPQAFKLQFSSDDFDDKIAELASELTDEANEILTVLQRLYFSLNLADILTNRQTKQVADSISTAMINRYDDHKHHLKMLKELEAQVTQEQRDGLKKAYDEYIDGDKPTIDTFYTNIKKNLDDSELANQIKSLIDLQAFMPKQRSKENGSIPHQLHQRELDQLIEVQGKYYPWLLAAKDKLDALIAFRVPYYVGPMIDPNQSDDPQNTKFAWMVRKEAGEITPWNFEEKVDKTSSATNFIKRMTTTDTYLLGEPVLPKNSLLYQQFTVLNELNKLKVNGKALTVDQKKYLYEHVCKKQRRVTLKKLSDCLMARGDFPMGAIFTGTTDQKNMNNTLKTYQDFQEIFGDEIDNPDRQVDFEKMIEWSAIFEDREIFKLKLAELNWLTSEQLERVSKKRYQGWGRLSQKLLTHIVNENGERIIDQLWNTNQNFMEIMGQDSVKQAIQEHNGANVAQTGINETIDELYTSPQNKKAIRQILLVVDDIKKAVGYAPANIMMEFAREDRDDHRLIASRARQLEKTYQEISKNWFDNESVTQELKDQIKNKTKFTDRLYLYFIQGGIDLYTGHPLNIDQLSSYDIDHILPQSFLLDNSLNNRVLTSQAENRVHKEDRLPGETVANKMRPTWKMMREQGLMTQRKYNNLTLKPDQISKFNNRGQFINRQLVETRQVIKLAADIMSQKYQADQTKVVTVKANLTHHMREKFNFYKSRNVNDYHHAFDAYLTLFVGNWLLKEYPKLQPYFVYGDFAKTGTNNLKSFNFLYRFERDHKLNDKGAIDTDKDQQLGYMKRIYRFKKMLVTKQLETNEGALYGQTLYPAPKNDKKTRNLINSKKNRPSDIYGGYSNENGSFLTLVKLKKGSKYDYRLVAVPVSKISEIKESELATIEKAIAPQFLKSSGKYRDFQVVLSKILINQKVIDDGMIFTIGSKSYKHNAKQVVLSDNSIQIVSTLSRISDKEKLITVFDEIVDITSKYLPWYKVNDVEKTKMLFRQMQDIDEMKKIIDNSLIGLHCNASITDLGKVGLSKYWGRFVLTAGISLTVDAQLIYQSPTGLFEHRVKVSDL

SEQ ID NO: 499 - protein, 1386 aa, Lactobacillus hominis
MTKITEDYIVGLDIGTNSCGWVAMDSKNTILRMHGKTAIGSHLFDAGNSAADRRAFRTTRRRIKRRKWRLKLLEEIFDSHLAKVDPYFFARLKESGLSPLDTRKNVSSIIYPTSLEDKKFYVDNPTIYHLRYKLMTEDRKFDLREVYLAIHHIVKYRGNFLYNTPVKAFEASKIDVKGSLKKLNELYEGLDSEFNVELDSNNALEIENIIRDKKIFKINKVKEINQLLSLKTEDKERTKLMKDVSKQIVNAILGYKTKFETILLKDVSKDEADDWEFKLTDVDADNKFENLIGDLNENEQEILLVIRKLANAITLSNIVEEGKTLSESMKDKYKKHSDDLKLLKQVISDHPDRDKAKKLALAYDLYVNNRHGKILQAKDILEKKKTLSKEDFYKEIKKNLDDSKESQEILDAISLDSFMPKQRTNENGVIPYQLHQLELDKIIENQGKYYPFLKEVNPVSSHLKQAPYKLDELIRFRVPYYVGPLISPNESTKNKQTKKNQNFAWMIRKEQGQITPWNFDQKVDRMASANKFIKRMTTIDTYLLGEDVLPANSLLYQKFTVLNELNNVKINGKRISVPLKQELYNNLFKKNSTVTTNKLKSYLKENYKLIKVEIKGLSDEKKFNSGLTTYNKLKNLKIFDQQIDDPNYNKDFERIIEWSTIFEDKAIYKEKLKTIDWLSDRQIDKLSKIRMQGWGQLSKKLLSQLTDNNGQTIIEQLWDSQNNFMQIVNQADFKDAIAVANQNLLVDTSVEDILNEAYTSPANKKAIRQVVKVVDDIVKATSGKVPKQIAIEFTRDADDNAKISQSRANKLRKVYKEMSNELASETIRNELERVAKDQKLLKDKHYLYFMQLGRDAYTGELIDIDNLEQYDIDHVLPQSFIKDDSLENRVLVKKAVNNGKSDNVPVKLYGNRMATDLGMTIRHMWEKWKEQGLITKTKYNNLIIDPDKINKYESSGFIHRQLVETSQIIKLVSTILQSKYPDTEIIVVKARYNHYLRKRLNLYKSREVNDYHHAIDAYLSAICGNLLYQVYPYLRPFFVYGQYKKFSSEPEKEKIIYDKTRRYNFISQIFENKDNDIISRETKKKVFDKKDIIEKLKRAYNYKYMLVSRETETHDQEMFKMTVYPRLSRDTKKSRNLIPKKKDMPTEIYGGYTNNSDAYMIIARINKKKGPEYRVFGVPMRELVNLRKAEKNGHYKAYLKQVLEPEIMYSKNGKKNKTISSFEIVKAKVPYKQVILDGDKKFMLASSTYVQNAKQLTLSQYSMQAITDNCENDTEEEKALVEAYDEILTNIDKYLPLFDINKFREKLHAGREKFVDLPLAEKKETILQVLNGLHDNAVMPKIKSLGLSTPLGFMQFHTGVSLSENAKLIYQSPTGLFEKRLKISDL

SEQ ID NO: 500 - protein, 270 aa, Lactobacillus iners
MITYLKDNDDITLSFPKDQLINIFKNSNLNSTEKSDQLKPFFGRTNLEKGIIKLLSGGKQDLSNMFRDETLKNSNYKNLKFSDNRFDDERDGYAADLGDRIDLLILLKQIYDASILESMMSQARVSIDGHKYISSAKVCAYEKHKSDLKRLKSLIKKYLPSEYNNIFRKITEKDNYVAYSKSNITNNKREKALKYVKYVDFTKYLTKKLKTIKTQDAEDDQEIFEIKGELEKQSFLPKQRTLDNSIIPYQLHLMELKKYLIINLNIMTFC

SEQ ID NO: 501 - protein, 255 aa, Lactobacillus iners
MITYLKDNDDITLSFPKDQLINIFKNSNLNSTEKSDQLKPFFGRTNLEKGIIKLLSGGKQDLSNMFRDETLKNSNYKNLKFSDNTFDDERDGYAADLGDRINLLILLKQIYDASILESMMSQARVSIDGHKYISSAKVCAYEKHKSDLKRLKSLIKKYLPSEYNNIFRKITEKDNYVAYSKSNITNNKREKALKYVEYVDFTKYLTKKLKTIKTQDAEDDKEIFEIKGELEKQSFLPKQRTLDNSIIPYQLHLME

SEQ ID NO: 502 - protein, 343 aa, Lactobacillus iners
MLAKDDQEGITVKDKIISLLTFRLPYYIGPVNPAVHGKFAWVKRLANGKVTPWNYKEKIDIDASHEEFIKTKLSKCSFLIGCDVLPKNSLLYQKYMVLSELNTIKFNGVNISEKLKDDIYQNLFKNIQKVTKKRLQNYIKEHENIIGDVIVTGIDNAFKQGLVSYLKFKKIIGDKIDDDRYQKVLEKIIRDITLYDECAGKKIKKEYKDSDLFTEDELNKIVKLTFNDWGRLSAELLDQLEGEDTVSGETGKIIEFMQKHNYNLMQLMSKKFTFKYKIDEINKSYYQHDKFNYKSMIDSLYVSPATKRILWQSLKVVHEISKIMKHDPEKIFYRNGTFQRRSS

SEQ ID NO: 503 - protein, 447 aa, Lactobacillus iners
MLYDHKLIGDKKYARLIRSKAFTDDELAGFIARQLVETRQATKETADLLKRLCPKSRIVYAKAQNASIFRQKFDIPKSRTINDLHHAQDAYLNIVVGNIFDTKFTQDPRNFIKNTKDSRNYNLEKIYDYNVERNNYVAWIAPDSKTNGTIANVKCNLSTKDFRVTRPSFYKKGALFNQNLSRKGSNLAPIKEHSPKSNPLKYGGYSGKNNSFFVVVAGKDNKGKDIVKLIPVNTLIYNKMLHCDYKAKQELLTSYVANNFAINNFRIVKDDIKMYSLVKIDGAYYYLVGGTDERIEVKNAMQLLLSKDSIKAVKILEKESKDQFANIKNYKDIDIKLGRTFNEVISKYTNSVFGKSMLISDKYRKDIFKSVDKSILEFNSLNTIAKADNLLKFVTSMRPAGSVDALKMVGLIERIRKSNVISNFNEFKLINQSVTGLFENEEDLLKL

SEQ ID NO: 504 - protein, 667 aa, Lactobacillus iners
MQKHNYNLMQLMSKKFTFKSKIDEINKSYYQHDKFNYKSMIDSLYVSPATKRILWQSLKVVHEISKIMKHDPEKIFIEMARSKEDHPKRKLSRKADLKQVYKDSKKQIISIIGKDKYQDLSNELDNKDDRDLRWDNLYLYYTQLGRSMYSLKPIDISELMNKNLYDQDHIFPKSKKYDDSIENRVLVEKELNVKKSDIYPISDANIIPQKIKGQVESFWKMLYDHKLIGDKKYARLIRSKAFTDDELAGFIARQLVETRQATKETADLLKRLCPKSRIVYAKAQNASIFRQKFDIPKSRTINDLHHAQDAYLNIVVGNIFDTKFTQDPRNFIKNTKDSRNYNLEKIYDYNVERNNYVAWIAPDGETNGTIANVKCNLSTKDFRVTRPSFYKKGALFNQNLSRKGSNLAPIKEHSPKSNPLKYGGYSGKNNSFFVVVAGKDNKGKDIVKLIPVNTLIYNKMLHCDYKAKQELLTSYVANNFAINNFRIVKDDIKMYSLVKIDGAYYYLVGGTDERIEVKNAMQLLLSKDSIKAVKILEKESKDQFANIKNYKDIDIKLGRTFNEVVSKYTNSVFGKSMLISDKYRKDIFKSVEKSILEFNHLDTIGKADNLLKFVTLMRPSGSAHSLKMVGLIERIRKSNVISNFNEFKLINQSVTGLFENEEDLLKL

SEQ ID NO: 505 - protein, 1395 aa, Lactobacillus jensenii; identical to SEQ ID NO: 118

SEQ ID NO: 506 - protein, 1382 aa, Lactobacillus mucosae
MDIGTNSIGWTAIDDHFSLLRVKGKNAIGVRTFKEGETAADRRGFRTARRRLSRRRWRLQFLDEFFAPYLAEVDPNFLARLKQSDISAKDPAKNQEYMGKLLFPDQEAASDGNGYPTLIQMRKAMPAEKAADFPVFNIYQLRYALMNEKRKFDLREIYLAVHHIVKYRGNFLNNTSVDKFKADQIDFNKSFETLNDLFRQVQPIAPFQIDLTKVDELGKLLLDTKQKKLDRQKAVAKLLPLIEDGTDKEIVKAHQQTAREISKLILGYKAKVGLILQNNLDQTLDMSTENSDDQLMQIAEELDDYQMELINQLSLLYSQIMLNEIVPNGETVSASMLNRYYKHRCQLKELKDYGAAQDKKTREQLDHLYAEYIGQIPKDSKFDFTKDLKKLMDKSDLGQKIKDEIEAGDYLPKQRTSANGVIPHQMHQQELDQIIENQKEYYPWLAEPNPVEKNIKNAKYKLDQLVSFRVPYYVGPMITLADQQKTSKASFAWAVRKKAGKITPWNFYDMIDREKSANNFIKRMTNKDTYLLSEDVLPASSLLYQKFTVLNELNNIRVNGRKLQPALKQAIYTDLFQKRKTVNLKTLTNFLAIHEPTLTKPKIEGLSNGRSFNSSLGTYIDMSKILGDSLDDLNYRDDIEKIIEWSTVFEDSEIYGVKLQEIQWLTNEQREKLVRKRYQGWGRLSKKLLTGITDENGQRIIDLMWDTSKNFMQIVHQPVFEEQIAELNQQLLQDADKAPLEVVDDILADAYTSPQNKKAIRQVVKVVADVVKAVGNAPASISIEFARNEDRNKELKNSRRHSIEKLYHETAEKLVKQTNLLEELGNVKDLNDRYYLYFTQAGRDMYDGTPINIDEISTHYEIDHILPQSFLKDNSLDNRVLVKKSENAAKSDRVPAKLYGAKMRAFWKQLKESQLISNRKYLNLTTDPEQVDKYQMQGFVHRQLVETRQIIKLAANIFGSLYPDSAVIETRAELTKQLREKFSLYKVRDVNDYHHAVDAYLTAFAGHYLYQRYPKLRPMFVYGDYAKIYADDLKRLRSVNLFHDLEKDQYNSGTAVNPETKEKIVDVDWLSDYVSKIQHFKYMLISKAVYTQHGQLYGATILPVAQVDKISAPIGIKDDKPVDIYGAYTNEVAAYMAIVRVNGKKPKYKVVSVPVRMLQRLKMAEQKGHDQYMQTLHDVLLRNFTSLKKNRKTGLKEAVVKDFDVLVPCVRYNQLVIDGDTKFTLGSATYQHNAKQLVLCNHSLETLANNFEYVRKHPDEADERMIMLYDDILDQVNHYFTLYDKNKFREKLNAGRDKYLKLPTFSQFENNKKTAIGKSEAIINILRGLHANAAITNLKCLGVSTPFGQLQSPSGIELSENAKLVYQSPTGLFSREVLLKDL

SEQ ID NO: 507 - protein, 1382 aa, Lactobacillus pentosus
MKKIVNYNLGLDIGTSSIGYAAIDDQGRPVRHQNKTVMGVRLFKEGKTAESTRIFRGTRRRLSHRHWRLGYLDRIFDNEIAKVDENFLPRLKASKRARSDEKRSFRGSLLFPETGDDAYYQKYPTIYHLRYALITQKKQFDIRLIYLALHHMIKYRGNFLDTTPVSAFNIHDIDLTDQFASLNDCYQLLDMDFEFQFDLNNIEQVQKLLLDETLSKTKRQAAVSKVLVMSTGNKAFDDQQNGIASEFIKALLGGPFDLSKILNLSVADVKSWKLHMTDKDVDDTLNSLVEELDENHKQIVNLLQMIYSQVMMLGLLNGQQSISASMIERYDDHAKHWAALKKLLPALGEQEQSTIIHAYTAYTGHSRTKQLSRAEFYTKVNSILKKHENIAEATGLIELIDRNEFMPKQRDAVNGVIPHQLHQRELQLIIQNQQKYYPFLAAKAYPDADETMIEQLLSFRVPYYAGPLVDRDFINESSDQEQAMQNTKFSWLKRREAGEITPWNFEQKVDVQETANRFIKRLTTKDTYLMTEDVLPKESLIYQRFEVLNELNAIRINDRRLTAENKQLAFQQLFMAGNTKNVSIKKFRNFVFDSLKFPEKVKITGFAGQHNFLAKLSTYHDFKKIFGERVDHTDLQPDFERIVEWCTIFEDRHIYREKLKEIQWLSQSEIDQLVLIRNHGWGRLSKRLLTGIRDSDGRTVMDQLWFGTDNFMRIISQSDFAAAIANENRTQLNQHGLEDVLDSAFMSPQNKKAIRQVLKVVDDIEQTLGCPPKKVMIEFTRSPDKKKQRTVTRLEKVQQAYKAVADQLAGQSIVSELDQYANTHSKLSDTYYLYFMQLGRDLYSGKPIDIDSPMLDDDHILPRAFMKDNSLDNRALTEKPINNTKAAKFPSKVFGQQKEVTDFWKLLRRCGLMSNIKEKHLYLDPDNVDKWTRRGFIHRQLVETSQVIKIVANILNDRYQQSQTEVLEVPARLGTELRECFGWYKVREVNDYHHVFDAYLAAFIGNYLYRRYPKLQPYFVYGNFAELNKAQLKNIKSFNFLYNITDNKRVVKDIETGQTLWDDQIRQQIQHIYEYKYMLTSHEAFTQHKELYGQTIYPRREFKPGTLKAIKQDQPQELYGGYKNLTAAYMCIVKIQARKRRAAEYRVVRVATESLSALQQAKRLGVQAYERCLRQELVRNNEILRTNADPNSAPREFEVLLDRVLCHQMIISDGQKYLLGSHAYKINCMQLVLSNNSMKILSTSIVKLKQMTNEPLVQVYREILDVVNKYFTLYDVNSFRENLNQFFDKFRTLPITNEYESSKSGKKLIHRGQLETLTLILRGLHANSDKVQYGDQSTLLGGFQTKDGIKLSKDSVIQYTSPAGLNVRTVKLRDLEQKEAQK

SEQ ID NO: 508 - protein, 1361 aa, Lactobacillus pentosus
MNEPYGVGLDIGTNSVGWTVVDMNGRVRKVKGKTALGARLFKEGATAEDRRGFRTTRRRLKRVKWRLRLLREFFDQPISKIDPNFFARRKYSDISPRDPNYNGLAKTLFNDRTDKEFYDDYATIYHLRDKLMTSNRKFDIREIYLAIHHIVKYRGNFLRTGPASQYGSASLHLATSFQKLNDLFAQSEETLNLKLVTDEALLQQIQQILVRTDLSRSEQQRQIWPLMAVLTGASAAEKKRQKNVVVELSKALVGLKAKMNVVTLTEVDAAVVKDWTFTMEESQDKLPEIEEQLSEVGQQIMDEVIQLYASVNLAQLIPAGKRFSQHMVEKYKHHEKNLELLKAYIHSQSDSKRGREIRATYDRYIDGVDSKPVTQEMFYKDLMKYVEADATSNHLAAEIKDEIDSEQFMPKLRTKQNGSIPYQVQQYELDQIISHQKKYYPWLGEENPVAERRGKFPYKLDELVGFRVPYYVGPLITKEDQQATSGAGFAWMVRKADGPITPWNFDQKVDRIASATAFIQRMQTTDTYLIGEDVLPARSLIYQRFMVLNELNNMRVEDRKLAPQQKQRLYNQVFKQHQHVSVKNIQQNLMDAGEYRKTPQITGLADPKGFNSSLSTYHDFKKILLEAIADEHKRADIEKIILWSTTFEDSAIFKQKLEEVAWLTDAQRKQLSGLRYRGWGQLSHKLLTAFKDDKGRSIMDGLWETSDNFMQLRKQPAIETQIKEANQANLTDADIQDTINELYTSPQNKKAIREVMLVLDDIKNAMHGQTPSWIFVEAARGGGVAGRRTQSRSSQIVEAYKGTAKEIVSEKVQHELNEKIKAKADFNTRLVLYFLQNGRDLYTNEAINIDRLSEYDIDHILPQSLVKDDSLDNRVLTSARINREKNDTFASEKFGRKMGAQWRELHRNGLMTQRKLKHLLMRPDEISKHATDFINRQLVETRQVIKLVEELISSEYPAASIVAVKANLTHQFRQTFNFPKLREVNDYHHAFDASLTAFIGMYLLKQYPKLERFFVYGKFAKQPINLTRFNIIRKLAVAEKPIANIETGEILWDKTADIKYFEKLYNYKRLLVTHEVRENYGAMFKQTLFKASYNKSKTLVPKKNHMETSVYGGYSNQETAYLAIVRIPFKSGFKFIVVGIPTRMVAKIKHYQSLGATLNQATHKVIEPKFTKISRKTKQTVISDYEVVLPKVYLDQVVRDQVKGQMYRFSLGSDKEYHNVQELYLPLSIQQAFVGHYDESDDQRSNDLVKVYDAALKQLQRYFPLHLSRNFDQVASQAHQSFEGLKNNVQTSDKQLGKKEVLNSLFVGLHANATRSNLSVLGMSKDFGRIKSNGITLTDQAEIIYQSPTGLFERKVALKDL

SEQ ID NO: 509 - protein, 1358 aa, Lactobacillus pentosus
MNEPYGVGLDIGTNSVGWTVVDMNGRVRKVKGKTALGARLFKEGATAEDRRGFRTTRRRLKRVKWRLRLLREFFDQPISKIDPNFFARRKYSDISPRDPNYNGLAKTLFNDRTDQEFYHDYPTIYHLRDKLMTSDRKFDIREIYLAIHHIVKYRGNFLRTGPASQYGSASLHLATSFQKLNDLFAQSEESLNFKLVTDEAQLQQIQQILVRTDLSRSEQQRQIWPLMVVLMGATAAEKKRQKDFAKELANALVGLKAKLNVVTLTNVDTTVVKDWTFTLEESQDKLPEIEEQLSEVGQQIMDEVIQLYASVNLAQLIPAGKRFSQHMVEKYNHHEKNLELLKAYIHSQSDSKRGREIRATYDRYIDGVKSKPVTQEMFYKDLMKYVEADATSNHLAAEIKDEIDSEQFMPKLRTKQNGSIPYQVQQYELDQIISHQKKYYPWLGEENPVAERRGKFPYKLDELVGFRVPYYVGPLITKEDQQATSGAGFAWMVRKADGPITPWNFDQKVDRIASATAFIQRMQTTDTYLIGEDVLPARSLIYQRFMVLNELNNMRVEDQKLAPRQKQRLYNQVFKQHQHVSVKNIQQNLMDAGEYRETPKITGLADPKGFNSSLSTYHDFKKILPEAIADEHKRADIEKIILWSTTFEDSAIFKQKLEEVAWLTDAQRKQLSGLRYRGWGQLSHKLLTAFKDDNGRSVMDGLWETSDNFMQLRKQPAIETQIKEANQANLTDADIQDTINELYTSPQNKKAIREVMLVLDDIKNAMHGQTPSWIFIEAARGGGVAGRRTQSRSKQIVEAYKSTAKEIVSEKVQHELNEKIKAKADFNTRLVLYFLQNGRDLYTNEAINIDRLSEYDIDHILPQSLVKDDSLDNRVLTSARINREKNDTFASEKFGRKMGAQWRELHRNGLMTQRKLKHLLMRPDEISKHATDFINRQLVETRQVIKLVEELISSEYPSASIVAVKANLTHQFRQTFNFPKLREVNDYHHAFDASLTAFIGMYLLKQYPKLERFFVYGKFAKQPINLTRFNVIRKLAVAEEPIANIETGEILWDKTADIKCFEKLYNYKRLLVTHEVRENYGAMFDQTIFKATDSRKRLIQKKKGFATETYGGYTGRTLAYLAIVKVVTNKDTQYQVVGIPTTMVTQIQQLEASGLTSKQAVTKAIGAMINENNKKLQSYEVLLPKVRFEQVVRDEVKGHIHRFALGTDTYYHNIQELYLPLTIQRAFLGKRNDTDAQTEQNLLTVFETTLAQVNRYFPLYEMNKFKQILNSAQEKFAALPTKNKTVKNKLVTGKDGVLNNLFIGLHANASLGDLKILGMKIGFGKLQVPGGLKLTDQAEIIYQSPTGLFERKVALKDL

SEQ ID NO: 510 - protein, 1358 aa, Lactobacillus plantarum
MKEPYGVGLDIGTNSVGWTVVDASGHVRKIKGQTGIGVRLFKEGAAAADRRGFRTTRRRLKRVKWRLRLLREFFDQPISKVDINFFARRKYSDVSPRDPNYNGLEKTLFNDRSDQDFYHDYPTIYHLREALMTQHRKFDVREIYLAIHHIVKYRGNFLRNDAATAYRSGTLDLQQHFETLNHLFSQADLELNLNLTTDVALLDSIKQTLVRTDISRSDRQKLIMPLLAVLTGATTAEKKRQKAVVTEFAKALVGNKTKIDVLTLTDIDATEAKDWAFSLEENQDKLPGIEDRFSEVGQQIIDEVIRLYASVNLAQLIPEGKRFSQSMVEKYKRHGEDLKLLKAYIRSQSDAKRGRAIRATYDQYIDGVKSKQVTQEAFQKALGKFVDADVDLNSWAAQIKQAIDSEQFMPKLRTKQNGAIPYQVQQNELDQIISNQKEYYPWLGEENPVIKRRGKFPYKLDELFGFRVPYYVGPLITKEMQAATANAGFAWMVRKADGPITPWNFDDKVDRVASATAFIQRMQTTDTYLIGEEVLPARSLIYQRFMVLNELNNIRVDDGQLTPRQKQRLYNQVFKKHKRVTAKNIQDNLVAAREFPTAPRITGLADPKVFNSSLSTYHDLKQVLPEAMSDVRKQADIEKIILWSTIFEDSTIFKQKLTEISWLTAAQLKQLGQLRYRGWGQLLRKLLTGLKDDNNRSIMDGLWETNANFMQLRSQPAIENQIKSANQANLTTADLQDTINELYTSPQNKKAIREVMVVLADIKDAMHGQTPNWIFVEAARGGGVAGRRTQSRSKQIVAAYQGTAQAIVRDQVQRELKEKIKNKANFNTRLVLYFLQNGRDLYTGDAINIDRLSEYDIDHILPQSLVKDDSLDNRVLTNARINREKNDTFASEKFGKKMGAKWKEMHRMGLMTKRKLDHLLMRPDEISKYATGFINRQLVETRQVIKLVEELINAEYPSTAIVSVKANLTHQFRQTFDFPKIREVNDYHHAFDAALTAFIGTYLLKRYPKLERFFVYGKFAKQPVNLTRFNVIRKLAKTDTPITDIDTGEVLWDKLTDIKYFETLYDYKRLLVTREVSENYGAMFDQTLLKASDNGKRLIRKKQSFDTAIYGGYTGKTLAYMAIVKVSTKKDVQYQVVGVPTTMVTQIEQLEQQGMTNKQAVTKVIEPLIAANNKKMLTYEVLLPKVRFEQVVRDRIKGQTHRFALGTDTYYHNIQELYLPLTLQRAFLGKQNESEVQLNQNLLTVFDATLAQVNRYFPLYEMNKFKKILNSARDQIELLEAKNQFVKNKLVLGKQGILTNMFIGLHANASYGDLKVLGVKIDFGKLQVPGGIKLTGDAEIIYQSPTGLFERKIALKDL

SEQ ID NO: 511 - protein, 1361 aa, Lactobacillus rhamnosus
MTKLNQPYGIGLDIGSNSIGFAVVDANSHLLRLKGETAIGARLFREGQSAAERRESRTTRRRLSRTRWRLSFLRDFFAPHITKIDPDFFLRQKYSEISPKDKDRFKYEKRLFNDRTDAEFYEDYPSMYHLRLHLMTHTHKADPREIFLAIHHILKSRGHFLTPGAAKDFNTDKVDLEDIFPALTEAYAQVYPDLELTFDLAKADDFKAKLLDEQATPSDTQKALVNLLLSSDGEKEIVKKRKQVLTEFAKAITGLKTKFNLALGTEVDEADASNWQFSMGQLDDKWSNIETSMTDQGTEIFEQIQEHYRARLLNGIVPAGMSLSQAKVADYGQHKEDLELFKTYLKKLNDHELAKTIRGLYDRYINGDDAKPFLREDFVKALTKEVTAHPNEVSEQLLNRMGQANFMLKQRTKANGAIPVQLQQRELDQIIANQSKYYDWLAKPNPVEKHRASKPYQLDELLTFRIPYYVGPLITPKEQAESRENVFAWMIRKDPSGNITPYNFDEKVDCPASANMFIQRMKNTDTYLIGEDVLPKRSLLYQKYEVLNELNNVSIDGRRLGADQKQRLIREVFERHSSVTIKQVAENLVAHGDFAKRPEIRGLADEKRFLSSLSTYHQLKKILHEAIDDPTKEHDIENIITWSTVFEDAAIFKTELAKISWLDSDTIKALSNIRYRGWGQFSRKLLDGLKLGNGHTVIQELMLSNHNLMQILTDETLKTTMAELNQDKLKADDIEDVINDAYTSPSNKKALRQVLRVVEDIKHAANGQDPSWLYIETADGPGTAGKRTQSRQKQIQTVYANAAQELIDSAVRGELEDKIADKASFTDRLVLYFMQGGRDIYTGAPLNIDQLSHYDIDHILPQSLIKDDSLDNRVLVNATINREKNNVFASTLFASKMAATWRKWHEAGLISGRKLRNLMLRPDEIDKFAHGFVARQLVETRQIIKLTEQIAAAQYPNTKIIAVKAGLSHQLREELDFPKNRDVNHYHHAFDAFLAARIGTYLLKRYPKLAPFFTYGEFAKVDVKKFREFNFIGALTHAKKNIVAKDTGEIVWDKERDIQELDRIYNFKRMLITHEVYFETADLFKQTIYAAKDSKERGGSKQLIPKKQGYPTQVYGGYTRENTAYLAVVKTVEKKADVYRVVRIATSQVAALKEARAQSTVKERELLKKFLTTKFTKIGKNGKKAITPFDIVIPRVPREQLFHNKRYGFFMVNSDTLMHNYQELWMSRSDQQILSKLVKSAKTVENGQVGRLFENIVEQINKYFPLYDINQFRKKLDQSKDIFSKLPLEGNGTTSGKRETIQNILTGAGTGAKNGDLKNLGIKTPFGFLQVPSGIVLDDDTTLIYQSPTGMLNRIVRLSEL

SEQ ID NO: 512 - protein, 1361 aa, Lactobacillus rhamnosus
MTKLNQPYGIGLDIGSNSIGFAVVDANSHLLRLKGETAIGARLFREGQSAAERRESRTTRRRLSRTRWRLSFLRDFFAPHITKIDPDFFLRQKYSEISPKDKDRFKYEKRLFNDRTDAEFYEDYPSMYHLRLHLMTHTHKADPREIFLAIHHILKSRGHFLTPGAAKDFNTDKVDLEDIFPALTEAYAQVYPDLELTFDLAKADDFKAKLLDEQATPSDTQKALVNLLLSSDGEKEIVKKRKQVLTEFAKAITGLKTKFNLALGTEVDEADASNWQFSMGQLDDKWSNIETSMTDQGTEIFEQIQELYRARLLNGIVPAGMSLSQAKVADYGQHKEDLELFKTYLKKLNDHELAKTIRGLYDRYINGDDAKPFLREDFVKALTKEVTAHPNEVSEQLLNRMGQANFMLKQRTKANGAIPVQLQQRELDQIIANQSKYYDWLAKPNPVEKHRASKPYQLDELLTFRIPYYVGPLITPKEQAESRENVFAWMIRKDPSGNITPYNFDEKVDCPASANMFIQRMKNTDTYLIGEDVLPKRSLLYQKYEVLNELNNVSIDGRRLGADQKQRLIREVFERHSSVTIKQVAENLVAHGDFAKRPEIRGLADEKRFLSSLSTYHQLKKILHEAIDDPTKEHDIENIITWSTVFEDAAIFKTELAKISWLDSDTIKALSNIRYRGWGQFSRKLLDGLKLGNGHTVIQELMLSNHNLMQILTDETLKTTMAELNQDKLKADDIEDVINDAYTSPSNKKALRQVLRVVEDIKHAANGQDPSWLYIETADGPGTAGKRTQSRQKQIQTVYANAAQELIDSAVRGELEDKIADKASFTDRLVLYFMQGGRDIYTGAPLNIDQLSHYDIDHILPQSLIKDDSLDNRVLVNATINREKNNVFASTLFASKMAATWRKWHEAGLISGRKLRNLMLRPDEIDKFAHGFVARQLVETRQIIKLTEQIAAAQYPNTKIIAVKAGLSHQLREELDFPKNRDVNHYHHAFDAFLAARIGTYLLKRYPKLAPFFTYGEFAKVDVKKFREFNFIGALTHAKKNIVAKDTGEIVWDKERDIQELDRIYNFKRMLITHEVYFETADLFKQTIYAAKDSKERGGSKQLIPKKQGYPTQVYGGYTRENTAYLAVVKTVEKKADVYRVVRIATSQVAALKEARAQSTVKERELLKKFLTTKFTKIGKNGKKAITPFDIVIPRVPREQLFHNKRYGFFMVNSDTLMHNYQELWMSRSDQQILSKLVKSAKTVENGQVGRLFENIVEQINKYFPLYDINQFRKKLDQSKDIFSKLPLEGNGTTSGKRETIQNILTGAGTGAKNGDLKNLGIKTPFGFLQVPSGIVLDDDTTLIYQSPTGMLNRIVRLSEL

SEQ ID NO: 513 - protein, 1352 aa, Lactobacillus ruminis
MNDNFDLMRVKGKKGIGVRLYNEGQSAAERRMHRTARRRYGRRKWRLRLLEDFFDEHMAEVDDTFFARLKDSNISPKDDKKYRKSLLFPKSKGVTYQDDGEFYKKYPTMYHLRYALMTEHRKFDLREIYLAFHHMVKYRGNFLYDTSVDSFEAKNLDIKGKFDEINDLLSSYTDFYVDNSNAALVESILLEKNTTRKDKSKKIAKLLHVEDKEKGKNKKAKDLATQISNAVLGLKCNFHLIFELQQKYSFDLCSEKTEENIAKLSEVLDENQKMLLMILKEVQDQVMLNAFVPSGMSLSEAMMQKYDDYGEQLKIYHELEHSVSDDSAAKLRGAYRDYNDNIIKRIDGDNKKDTFYKRVKNILTKISKEYVDQDVLESCGKLKKLIDENKLFIRQRTAANGVLPHQLHQIEMRKIIDNQKEYYPWLAEPNPNEKRRVYSKYKVEELIAFRIPYYVGPLVDPNNADKNKEARFSWMVRKKDGEITPWNFYDKVDWAESANNFIERMKSKDTYLLGEDVVPKESMLYQKYEVLNELNNLRINDSGLSDSFEDVKLKQAIYNDLFKKQKIVKITDLQNYLVQNHKYLVKPKISGLADENRFLSSLSTYSDLKTIFGDKVDDRTYFNDFEKMVEYSTVFEDGHDYNQKLDEYTWLTKEEKYKIGKKRYRGWGKLSKKLLTGLRDKNNHTIMDNLWETNRNFMQIQTADEFSKQIAEENERHLKGSVSDAINDMYTSPANKKAIRQVLRVVDDIQKAMGYAPSSISLEFAREDGPSVRTVSRANRMKSIYEKYASEVSEEVMKDLDGVIKDKKGLNDRLYLYFEQQGKDMYSGHPLDFDKVISGQEYDIDHILPQAVIKDDSLDNRVLTTKALNNDVKSKGVPCRMFNGMHSFWKNLYDKGFISRRKFNNLTTNPENIDKYKMKGFVNRQLVETRQIIKLVANVLNDKYQNDDVDIIEVRAELTHDVRKHFKFYKNRNVNDYHHAFDAYLTSFIGHYLFKKYPNLRPLFDYNDFMKVSDNVFKQLRGNNFLGEFLNKTGDIISTDGNFVLNKEEMINKLNKAYAFKKILVTKEVGQRTGAMFNETRYPAPNSRKAALKYRRMPKPDSLISVKDYKNTDIYGGYSGKNDAYMVIVDMGKQYMVVGVPVRYTEKLDKLRIKHSELYRDELRKVLSRDKTLLDSKGNVKRFDIVLDRVLYGQLIEDGNELFTLGSSKYKRNFRQLFLDKQCIEILDSSATPQPTDEELIWVYDQILDKVDKYFELYDINRQRETLRKGRAAFCSLPNISMKKDDVTKKKILNEILVALHANESESNCEKIGKKVFGRLQVPGGIKLSKEAKLIYQSPTGLFERVVYLKDL

SEQ ID NO: 514 - protein, 1339 aa, Lactobacillus salivarius
MERYHIGLDIGTSSIGWAVIGDDFKIKKKKGKNLIGTRLFNEGATAAERRGFRTQRRRLNRRKWRLKLLEEIFDPYMAEVDEYFFARLKSSNLSPKDSNKKYLGSLLFPDKSDSNFYDKYPTIYHLRRDLMEKDEKFDLREIYLAIHHIVKYRGNFLEKVPAKNYKNSGASIGFLLEEVNSLYKDIIGDESIAILNSEKFEDVEKIILDEETRNLDKQKSVGKLLVEDKKKKNIVTAFSKAIFGYKFNIEDLLLIENDEKNKLTFNDENIDDIFNELSHSLDDKQMDLLTKTREIYFKFKLNMIVPTGYTLSESMIEKYEMHKAHLKMYKEFINTLNTKDRKILKNAYSDYINTEKAKAANAQENFYKTVKKIIKDNNSDTAKKIIVLIDEGNFMPKQRTGENGVIPHQLHQIELDRIIENQAKYYPWLAEANPVEKNRKFAKYKLDELVTFRVPYYVGPLIDKTESNKNEKETKFAWMVRKAKGTITPWNFENLVDRTESANRFIKRMTSKDTYIIGEDVLPASSLLYEKFKVLNELNNIKVNEKKLDIEQKQDIYLNLFTTAKNVTKKSLATYLNCSADSISGLSDGEKFNSSLSSYIDLKAILGNIVDDCNKNEDLEKIIEYSTVFEDGNIYKEKLSEISWLTDEQIEKLSNIHFKGWGRLSKKLLTQITNENGERIIDALWNTSNNFMQIINDESIQAKLAEINGKYAGKSDLEDILSEAYTSPQNKKAIRQVMKVVEDIEKAMQCEPTSISIEFTRKKQKSRLTNTRYKKISDVYEKIADEVISEYELRKLQSELDSNANNMRDRYYLYFMQLGRDMYTGEKINIDELHQRYDIDHILPQSFIKDDSINNRVLTRKDVNNKEKSDKTAADLYAVEMSDFWRKLRKQGLITEQKYKNLLTKSDSIDKYAKKGFIKRQLVETSQVVKLVANILQDKYSDTKIIEVRAKLNSNLREEYKLIKNRAVNDYHHAIDGYLTTFIGQYLYKTYPKLRSYFVYNDFKKLDSNYLKHMKKFNFLWQLQDDKTIDIYDNVNNKFVLNVPEMKKYIQKIYNYKYMLVSKEVTTKNGAFYDQTKYNAKTVNLIPIKKNKPTNIYGGYKGKVSSYMMLVKIRKKKEVIYKFVGVPRLWTDELDRLKDTTERKILLNEIAKNSLSKTEQDFEVILDKVYYGQLIIDGNQKYTLGSSEYKYNAMQLHLSKHALEVLAKENVKDAEITDKDLVSVYEEILSVVNKYFELYDINKFRQKLNEGLEIFRKLPVYNVYESNKIKQVGKFEVLNRILMGLHANAMITDLKVLGIKTKLGQMQVNGGIKLSPDAKLIYQSPTGIFSRAVRVKDLG

SEQ ID NO: 515 - protein, 629 aa, Lactobacillus salivarius
MERYHIGLDIGTSSIGWAVTGDDFKIKRKKGKNLIGTRLFKEGNTAAERRGFRTQRRRLNRRKWRLKLLEEIFDPYMAEVDEYFFARLKDSNLSPKDSNKKYLGSLLFPDISDSNFYDKYPTIYHLRRDLMEKDEKFDLREIYLAIHHIVKYRGNFLENVPAKNYKNSGASIGFLLEEVNNLYKDIVGDENVTILNSEKFEDVEKIILDDGIRNLDKQKGVGKLLVEDKKNKNLVTAFSKAIFGYKFNIEDLLLVEGDEKSKLTFNDENIDDIFNELSHSLDDRRMDLLTKTREIYFKFKLNMIVPTGYTLSESMIEKYEIHKAHLKMYKEFINTLNSKDRKILKNAYTDYINNEKAKAANAQENFYKTVKKTIKDNDSDIVKKIIDLIDEGNFMPKQRTGENGVIPHQLHQIELDRIIENQAKYYPWLAEENPVEKNRKFAKYKLDELVTFRVPYYVGPLVDKTESNKNEKETKFAWMVRKSKGTITPWNFENLVDRTESANRFIKRMTSKDTYIIGEDVLPASSLLYEKFKVLNELNNIKVNEKKLDIEQKQNIYLKLFTTTKNVTKKNLATFLNCSIESISGLSDDKKFNSSLSSYIDLKVILGDIVDDYSKNEDLEKIIEYSTIF

SEQ ID NO: 516 - protein, 897 aa, Lactobacillus salivarius
  misc_feature (822)..(822): Xaa can be any naturally occurring amino acid
MLIESDEKNKLTFNDENIDDIFNELSHSLDDNQMDLLTKTREIYFKFKLNMIVPTGYTLSESMIEKYEMHKAHLKMYKEFINTLNAKDRKILKNAYSDYINNEKAKAANAQENFYKTIKKTIKDNNSDTAKKIIGLIDEGNFMPKQRTGENGVIPHQLHQIELDRIIENQAKYYPWLAEENPVEKNRKFAKYKLDELVTFRVPYYVGPLVDKTESNKNEKETKFAWMVRKAKGTITPWNFENLVDRTESANRFIKRMTSKDTYIIGEDVLPASSLLYEKFKVLNELNNIKVNKKKLDVEQKQHVYLDLFTTRKNVTKDNLATSLNCDVESITGLSDNEKFNSSLSSYIDLKAILGNAVDDCNKNKDLEKIIEYSTIFEDGNIYKEKLSEISWLTDEQIEKLSNIHFKGWGRLSKKLLTQITNENGERIIDALWNTSNNFIQIISDESIQAKLAEINGEYADKSNLEDILDEAYTSPQNKKAIRQVMKVVEDIEKAMKCKPTSIAIEFTRRKGKSKLTNTRYKKISETYEKITDELISEYELGKLQSKLDSKANNMRDIYYLYFMQLGRDMYTGEKINIDELHQYYDIDHIFPRSFIKDNSLNNRVLTRKEINNNEKADRTAADLYAVKMGDFWRKLRKQGLITEKKYKNLLTRTDSIDKYTKQSFIKRQLVETSQVVKMAANILQDKYSNTKIIEVRARLNSDLRKEYELIKNREVNDYHHAIDGYLTIFIGQYLYKTYPKLRSYFVYDDFKKLDSNYLKHMDKFNFIWKLEDKKAEDVYDNVNNEFILNVPKMKDYIQKIYNYKYMLISKEVTTESGAFYXZTKYNAKTINLIPIKKDKPTNIYGGYKGKVSSYMMLVKIQKKKEVIYKFVGVPRLWTDELDRLIDTDEKKALLKK

SEQ ID NO: 517 - protein, 1419 aa, Lactobacillus sp.
MAKPQNYTIGLDIGTNSVGWTVTDDQNNILRIKSKKAIGARLFEEGKVAAERRSFRTTRRRLSRRKWRIKLLEELFDEEISKVDPNFFARSHESWISPKDKRERYSAIVFPTPEEDKKFHNEYPTIYHLRDRLMKDDQKHDIREIYVAIHHIMKYRGNFLHDESIETYRSGMSSLGGGDERTILNTKILDDLNDAFADNLATQGISVNSASADQINEIVTSGHLNVDSQKAIAKLLLPTTLSSDDKKQDKKIKKLATDAAKNVASAWLGYKANFAAILNIQEVDKDKKKIYSFALQGADEEDKVETLESVLSQDQIEIVDRIIRIRHAIVLGEIIPVGMTLSEAMIEKYDQHAKDLKNLKTVIRNLKDRKNAVKLQAIYDLYVNNRHADTAKAMKLAGVKKRTELLEPEEFNKSIEKLLDDSPVSAEIKKRIAEKDFLPLQRSNSNGVIPNQLHQIELDEIIKKQSKYYPFLGETNEHASADVARKAPTKLDQLLTFRVPYYVGPLITKEEQEEQDGHSFAWMIRKNPKDHEKITPWNFDEKVDRMASATQFIKRMTTKDTYLLGEDVLPSSSLKYQLFTVLNELNNLRINHKKLTREEKEQVIEDLFKKYKTVKADKFKNYWQKGHAGLDVKIQGMADPEKFNSTMSTYIDLQKIFGDQLDDAQRQNDFEKIIEYSTIFEDRKILGEKLRADFVWLSEDQIKRLCRLRLQGWGRLSLKLLTRLTDADGQNVLERLLNSNDNFMQIVKDPVIKAKIEQKNQKLLRADWSENATESILDEAYTSPQNKKAIRQVMRVVHDIVKACDGNLPAKFAIEFARSQDDDPKRTVARADRLQKIYAQISDEVVSQGVKDQLSGMKSLKDRYYLYFMQGGRDAYTGKPLNIDRLSDYDIDHIMPQSFIKDDSLDNRVLVTRAVNNQKSDNVPVLLYGNHLVADLGITIREMWDRWQKSGMISKRKLANLLTDPATLSEYRAEGFINRQLVETSQVIKLTATILQSEFPDSKIIEVPAKYNSILRKQFDLYKSREVNDYHHAIDAYLSTIVGNYLYQVYPNLRRLFVYGEFKKFSHGEEESSHQAVRRVKSMNFLDDLLRGKHGDDIYCRVTGEVIFSRKDIISKLKQAYSFKQMLVTQEVFTKKSALFDQTVYPSPARDSKTRSGLIPRKQGMDTEIYGGYSGNKDAYFVLAQVVKSKGHTLQVVGVPIRALRALANCSNYSEQLLKIVKAQVLFNKKTGKAKKGISDVRILLDKIPYRQPVLDGSAFYMLGSSTYKYNLKQISLSQQSMKYILDYIDDPNFNKHEMTKIDQQNEKECLLSVYDEILDKMDKYLSLYDINGFRKKLHVGRDKFIKLEVEKQAEAIKNVLRGFHANSDMTKLSDLGLSTSLGFMQASDGIKLSDNAVFIYQSPTGLFERRVKVSDLLK

SEQ ID NO: 518 - protein, 1289 aa, Lactobacillus versmoldensis
MRRRYRRRRNRLNWLDELFADELAKIDPSFLLRMKNSWVSKKESTRKRDPYNLFIDEKYNDVDYFNQYPTIFHLRKELITEDKKVDIRLIYLAIHNIIKYRGNFTLENQNFDISQLSSNFSQQISDFFALFSDFGVIMPEDFDPDKISDILLNPNLSPSGKVSEAIATISPKTNVKAKIKIILLLLVGNNGDLKKLFDLETTEKIAVKLSSRHIDSELPIILSELNEQQENIITIANSIFGSIILKDFLGDETSISAAKVISFEDHKQDLQKLKTMWRETSNKEAVKAGKKAYEDYIGHEDSETFYKKIKKFLEKAQPVDLANKALAEIELENYLPKQRNRNNTVIPYQLNENELIAILDHQEKYYPFLKENRDKILSLLTFRIPYYVGPLQDSNNNRFSWMTRKASGAIRPWNFSEKVNVEQSSNDFIKRMRSTDTYLIGEPVLPKKSLIYQCYEVLSELNNTRVKDGSSNPKRLDVTIKQRIYNEIFKNQKSVSVKVLQNWLIKESYFKSPEISGLADKKKYLSSLSTYIDFKKIFGQRFVDDPVNSPQLEELAEWLTLFEDKKILLIKLQNSKYSYDQATINKLSTMRYQGTGKLSKKLLVDLKTTKKSIGKSGAESLSILDLMWSTKDNFMQIIHDADYTFEQQIKEFNYDTEDELTPLEKVANLHGSPALKRGLNQSIKVVADIVKFMGHDPEKIFIEFTRSDDFSKLTISRYRRIKKQYLEIAKAIKKIPAEFKDIKEYQTQLEENKGKLASERLMLYFLQCGHSLYSNKPIDLNMINSSKYHVDHILPQSYIKDDSLENKALVLASENENKIDNMLISHDIIATNLPRWQALKDQNLMGSKKFADLTRTTVTENQKKGFIQRQLVQTSQIVKNITLILNDLYKNTSCIETRATLSSEFRKAFSNFDETTYHYQFPEFVKNRDVNDFHHAQDAFLACVIGEYQLKKYPKDNLRLVYDQYSKFLDSLKKDTRKKNGRMPRYTQNGFIIGSMFNGKTYVDDNGEIIWDQKIKESIRKTFNYHQFNVVRQTIEQHGKLFNDTIQPHSDRYKLIPLKTNRDPAIYGGYNNDNNAYSVVLDVDGKKKINGIPIRIANQLKSDELDLSSWLENNIKHKKPMTILIDKVPKYQRIINEETGDLLITSANEVINNVQLFLPSMYTALISLLDSTKTEMYSKLLSNYEANILIDIYDYLLTKLKNNYPLYRKEWAKLAEHRDDFIESDLVTQASTLQQLIKFMHADPSNVNLKFGNFKGNRFGRKNGNIKLSKTDFIYESPTGLFKSIKHID

SEQ ID NO: 519 - protein, 1372 aa, Legionella pneumophila
MESSQILSPIGIDLGGKFTGVCLSHLEAFAELPNHANTKYSVILIDHNNFQLSQAQRRATRHRVRNKKRNQFVKRVALQLFQHILSRDLNAKEETALCHYLNNRGYTYVDTDLDEYIKDETTINLLKELLPSESEHNFIDWFLQKMQSSEFRKILVSKVEEKKDDKELKNAVKNIKNFITGFEKNSVEGHRHRKVYFENIKSDITKDNQLDSIKKKIPSVCLSNLLGHLSNLQWKNLHRYLAKNPKQFDEQTFGNEFLRMLKNFRHLKGSQESLAVRNLIQQLEQSQDYISILEKTPPEITIPPYEARTNTGMEKDQSLLLNPEKLNNLYPNWRNLIPGIIDAHPFLEKDLEHTKLRDRKRIISPSKQDEKRDSYILQRYLDLNKKIDKFKIKKQLSFLGQGKQLPANLIETQKEMETHFNSSLVSVLIQIASAYNKEREDAAQGIWFDNAFSLCELSNINPPRKQKILPLLVGAILSEDFINNKDKWAKFKNFWNTHKIGRTSLKSKCKEIEEARKNSGNAFKIDYEEALNHPEHSNNKALIKIIQTIPDIIQAIQSHLGHNDSQALIYHNPFSLSQLYTILETKRDGFHKNCVAVTCENYWRSQKTEIDPEISYASRLPADSVRPFDGVLARMMQRLAYEIAMAKWEQIKHIPDNSSLLIPIYLEQNRFEFEESFKKIKGGSSDKTLEQAIEKQNIQWEEKFQRIINASMNICPYKGASIGGQGEIDHIYPRSLSKKHFGVIFNSEANLIYCSSQGNREKKEEHYLLEHLSPLYLKHQFGTDNVSDIKNFISQNVANIKKYISFHLLTPEQQKAARHALFLDYDDEAFKTITKFLMSQQKARVNGTQKFLGKQIMEFLSTLADSKQLQLEFSIKQITAEEVHDHRELLSKQEPKLVKSRQQSFPSHAIDATLTMSIGLKEFPQFSQELDNSWFINHLMPDEVHLNPVRSKEKYNKPNISSTPLFKDSLYAERFIPVWVKGETFAIGFSEKDLFEIKPSNKEKLFTLLKTYSTKNPGESLQELQAKSKAKWLYFPINKTLALEFLHHYFHKEIVTPDDTTVCHFINSLRYYTKKESITVKILKEPMPVLSVKFESSKKNVLGSFKHTIALPATKDWERLFNHPNFLALKANPAPNPKEFNEFIRKYFLSDNNPNSDIPNNGHNIKPQKHKAVRKVFSLPVIPGNAGTMMRIRRKDNKGQPLYQLQTIDDTPSMGIQINEDRLVKQEVLMDAYKTRNLSTIDGINNSEGQAYATFDNWLTLPVSTFKPEIIKLEMKPHSKTRRYIRITQSLADFIKTIDEALMIKPSDSIDDPLNMPNEIVCKNKLFGNELKPRDGKMKIVSTGKIVTYEFESDSTPQWIQTLYVTQLKKQP

SEQ ID NO: 520 - protein, 907 aa, Leptospira inadai
MAKSIEEIRSIQNEFVVEYSILLKKIKKGEIDKKNDVYKVYQNTIKSSERLEQVLKERLGFQNVSKSYFNNPYSIAQLYNLISVDRSGFSKVCRSCQEENHWRSTLIDTDRGPQAQASKQVSDTGRPFDGQLAMLLDRIAFEIVKLKRIEIERLLSNKNSSKIEVVEIPLLIEENSFNFRYELAELKKLSKKKKDQLKKSVEEFDTKLNSKQERIKAASRELCPYTGKKISKGEIDHILPRSWTQKQFGTALNAEANLIYASREGNQSKGNREYGLNDLDEKYLNIIFGTKEVDSIQRNISDTIDRLDIERGTTRIVFDRLAPNERDCLRHALFIKSLRPKVFELLSGQLKARVNGTQLYLAKRIRSLLLKNQDFITKSLIIKVPSFSFYEPRTVDLPYMRKELAEKFPNLGKQNPQPTGSHIIDAAMVMAYAVETDSGNLSFGSKDKSEGFDSESLSRFLPSNIQFLSIKSKDKTDSKYPYKKPLFKDGVFGERFLPILIAEKGLRVGYTLENSLEVNSENPEEFFNVLKPYLLFKRKPIESNYQTLVAFAQKDKRGYIVLPVNKPKALESISQRKSDPHTSILKNILYTVSRESIPSLIFDKNTLIPEIKSNKVNWGDKLEKKFRIKIEIKLYGKKIADGFIRYPGKTEWEKLLLTEPLKGLVKNKTLTPKWFDSLENLAGLDDHFKDTSNPEAKHKRKSNHYALPVPKGPSGGFRIRRNSFDGYKVYQLYSVDGNSFHAFKIENGWTGKTLLLDIYQNSGNLHSLDYDYENTDISQTALFSKFYKIEFSKEETQKINSKGIKSLYVAPGSSSRQYIRVIFDKQTFSKFIKFQSKFWEFDLITPLPKDKAKDLIESILKIFPEDLRPKKPRNDIHIQNISHDSVQVEYIADGKTQGFGQYFINQN

SEQ ID NO: 521 - protein, 418 aa, Leptospira inadai
MILKSPIAIDLGAKNTGIVYTTYQPNALPTEIHGATIISDNLKLSQVDRRAKRHQRRNYTRMKLARRLVYLIIRYHYRIPEQDLTPEVKTSLQSLLTRRGYTFQSIETEGNELGQAPWGEIEDYFPNVQDYEKSLPIQTVLYHFFSSENLELNKLVPSKEPETKEDKNILKYIREQKEAFESEQNNGARHRLKYFEEIKEDFPRKIKLMECLQKNKIEEKKFLNLIQNISNLQIKPLRAYFNDKDMKEKEIWEPRRLHTYIARWIRSWHIDPKNSSKRLIRQKLLSQLENGKLKIIRDTSIYSPSKDIISFLEEIDPKDTIPPYEDQNNRHPPRCQNLWLDGKILDRYFPGWEQSLWKLIRNEKNNPFEQLITKDFRTDDTISEGKSLSEQIQIYERSHSNIKLDVRAVILQRFLDRS

SEQ ID NO: 522 - protein, 125 aa, Leptospira inadai
MSAYDRSANLDPWSLRLQGKAKKEIKTTESLSKTDLQKASDAYEKIKEILSESDTDQFIKLANRYYLEVADIKKGMWLPTAPERKHKEIPKSIAHEENQDISLFHKCNTKTGSKKRISQVSLEMF

SEQ ID NO: 523 - protein, 1355 aa, Leuconostoc gelidum
MTYSIGLDIGTGSVGWAVIGDDYRLKRAKGKNLIGVRLFDSATTAAERRGYRTTRRRLSRRHWRLRLLNDIFASDLAEQDENFLPRLKYSWVNPDDEQNPQLNSDVANGALFGSSETDKAFHKNYPTIYHLRHELMTDTAKHDLREVYLAIHHIVKYRGNFLNTADKINAENSFNVDLFIAALDEYNEFLETPITSIKDAQLFSDKLTDINARNKSVRVENAMSETYDDKSKIFKAILTALVGNTANFQTIFDLSDLEKDEAKNFKFKLDLEDVETKLDVVRAKLSDEQNAFLEAVLIAYDGITLKMILGDYKSISQSMIESYKSHQRDWKYIKNNVRLNEQKIEPDKNSVKFFKLDPKKLIYPSNLAYLQVISSNEDEHRKGLDYFKTAIQDADILQRIENDTFLPRQRTKRNGVLPYQLHLAELEQIIKKQSKYYPFLANIYTQDNKTENKLIGLLKFRVPYYVGPLVEAEKVTGDGKNHWLIKKELQENTPITPFNFDDVVDKDKSGEQFIKRITGTDSYLIGEPTLPENSLLYQKYNVLQELNNVRNERHQRLPIKVKQDIFEHVFKIDKNVNAKKVMAYLKLNGYGDFQIAGLSDTRTGKFNSNLSSYNYFVDLLGREKTEKIREDRLEEIIEIQTVFEDKILVAKRLSNLDFLTPQEKSKLSAKHYTGWGRLSQKLLTTQFIKTALSEAGDIIPQSHSIIDLLYYTDKNLMEILNDKTFNVRNWLTEQNKGTESGNSLYDQIDALAGPKDIKRGITQVFSIIDDIKKAMGSNPETVYLEFARETQTSRLTNSRLNRVQEIYNSPELKTEFAYLAKKLEAETKESIHDDRLYLYYLQEGRDMYTGKEIPFDQISSNYDIDHIIPQAFTKDDSLDNRVLVNRATNARKSNSPTFTNDIIDNRKSWWQSLVKRGLMSKEKFERLTDKRKTFSENQTNHFIARQLVETRQIIKNVADLIKNNYDGTQAVAIRASLTGEMRRYLDWPKNRDMNDYHHAHDALMMATVGKYVDRRGFFDNGSVSDGAGNAYNLYTKDWLVAARVGTRNDSQRVNPYGFIVGSMNSKAVRQQVNKETGEIVWGNENLDYLRHVLSYKKILVTRRLSGSSGRLYAETLFSPNPKAKLIAQKANRSVALYGGFTKAESAYTALVEFNKKGDRSYKLIKVPMAIANRVNDKQITVTAYIASLNLRDFSRVVLEHLPLGTLIRESDGSEFYAASSEYKHNAKELWAPKEILRSSKKLDKATADNLIDIFDFLTNDKTISNFKFYEKDLLHLKNVRDKFVEASDEIKIKVLSDVIYELHNDAGWRDPFKHIQEKPAWTMLQVKGGIKLSEKAAIVYQSPTGLFETITIVGE

SEQ ID NO: 524 - protein, 883 aa, Leuconostoc pseudomesenteroides
MIGVRLFEGADTAAERRGYRTTRRRLSRRRWRLRLLNDIFASELSKIDENFLPRLKYSWVNKNDTDNVHFGVGVFDNSEQEKAFYQDYPTIYHLRQKLMTDNRQHDLREVYLAIHHIVKYRGHFLNSGEISANSSFDAQKFLELLREFDNTFYPDAVKFLNLDQLDLPDKISSEISDSKISKSERVDRVLQHVQLANSGAKKILKAILNAVVGNSVDSVAMFSLSDLDKEEKKKINHPVTDSKPFKYSDKEVEAKLDELSNLLQDEQKIEFLSLLKLSFDGLTLKMLLGNAKSVSEAMVERYKVHKDDLKFIKENILNSFSKDKKKEFDKYYEAHLAEKDVDNVDKYFKKIIDDSIISKDKKIELLQKIDDHDFLPSQRSKINGAIPHQLHRNELDKIISQQSKYYPFLADSYTQNGKTETKLAGLVNFRVPYYVGPLVSKENADRNNPDGGQNHWVEFKENTSLSNLTPWNFNEIVDKDKSAAKFIERLTGMDTYLIGEPTLPQNSLLYQKYNVLQELNNIRVDNHKLDVKIKQDVFEHLFKTQNSVSAKDVKNYLIANGYAAPSIQITGLSDTNEKTFNSKLSSYNYLVDKLGRTFVESVKSDVLEKIIELQTVFEDKTVLLRQLSMISELTLAQANQLAEKHWTGWGRLSRKLLSSKVVDVNKITNSTFYPATSRQTIIDTLYHTQLNLMEIINNAEDLYGVRQWISEQNKSDSSDTNDVYDQIQELAGDKKIKRGITQSFRILDDIVKAMGGEPERVYLEFARENQQSGVSFSRKNLLSKLYENDSLKQTFKELKSQLESETKENLQNDRLYLYYLQQGRDMYSNDELNIDQLSSYDIDHIIPQAYTKDNSFDNRVLVSSKANRLKRMLLWYPVKLSKK

SEQ ID NO: 525 - protein, 468 aa, Leuconostoc pseudomesenteroides
MKDQGFISKRKFENLTRRGDFSEQQKERFIARALVETRQIIVNVSSLIDSHFNHTKAVAVKSNMTTDMRHYTKVPKNRDINDYHHAHDALFVATVGQYIENKGFMKAGKLSDSVGNEYNRYTKKWIETARKNTNYGRVNPFGFVVGSMQTATRGKLDYETGELKVVKNNYWSKDDLDYLLKVVSYKKILVTTKLQDNKGAMYDANLISAKGSGKKKAQLQISKSKNIDLYGGFNKLQNEYSVLILNHDEYRWLSIPMYARNSSEQYLHDKYPDAKVILNHILVGQPILLSNSSDPQKSKFASLRIATGGDYHNNFEFVPSVDVKKILDNIYLNHSVTDDEYKKVFESLLATLHDKFVFGIHQVMYNKIFDNKYLFDKMPDEAKRNVINSLLKFMNISKNQLGAVGKIGGKVNGVLYGFKTETEKGTSAGQLISNGKMQPHDIFIFQSPTGIFERRVTVAELANVIKDE

SEQ ID NO: 526 - protein, 1103 aa, Listeria innocua
LKLYPGEKSTGMFAQFISLIVGSKGNFQKPFDLIEKSDIECAKDSYEEDLESLLALIGDEYAELFVAAKNAYSAVVLSSIITVAETETNAKLSASMIERFDTHEEDLGELKAFIKLHLPKHYEEIFSNTEKHGYAGYIDGKTKQADFYKYMKTTLENIEGADYFIAKIEKENFLRKQRTFDNGAIPHQLHLEELEAILHQQAKYYPFLKENYDKIKSLVTFRIPYFVGPLANGQSEFAWLTRKADGEIRPWNIEEKVDFGKSAVDFIEKMTNKDTYLPKENVLPKHSLCYQKYLVYNELTKVRYINDQGKTSYFSGQEKEQIFNDLFKQKRKVKKKDLELFLRNMSHVESPTIEGLEDSFNSSYSTYHDLLKVGIKQEILDNPVNTEMLENIVKILTVFEDKRMIKEQLQQFSDVLDGVVLKKLERRHYTGWGRLSAKLLMGIRDKQSHLTILDYLMNDDGLNRNLMQLINDSNLSFKSIIEKEQVTTADKDIQSIVADLAGSPAIKKGILQSLKIVDELVSVMGYPPQTIVVEMARENQTTGKGKNNSRPRYKSLEKAIKEFGSQILKEHPTDNQELKNNRLYLYYLQNGKDMYTGQDLDIHNLSNYDIDHIVPQSFITDNSIDNLVLTSSAGNREKGNDVPPLEIVQKRKVFWEKLYQGNLMSKRKFDYLTKAERGGLTEADKARFIHRQLVETRQITKNVANILHQRFNYGKDDHGNTMKQVRIVTLKSALVSQFRKQFQLYKVRGVNDYHHAHDAYLNGVVANTLLKVYPQLEPEFVYGDYHQFDWFKANKATAKKQFYTNIMLFFAQKDRIIDENGEILWDKKYLDTVKKVMSYRQMNIVKKTEIQKGEFSKATIKPKGNSSKLIPRKTNWDPMKYGGLDSPNMAYAVVIEYAKGKNKLVFEKKIIRVTIMERKAFEKDEKAFLEEQGYRQPKVLAKLPKYTLYECEEGRRRMLASANEAQKGNQQVLPNHLVTLLHHAANCEVSDGKSLDYIESNREMFAELLAHVSEFAKRYTLAEANLNKINQLFEQNKEGDIKAIAQSFVDLMAFNAMGAPASFKFFETTIERKRYNNLKELLNSTIIYQSITGLYESRKRLDD

SEQ ID NO: 527 - protein, 1337 aa, Listeria innocua
MKNMKKPYTIGLDIGTNSVGWAVLTDQYDLVKRKMKIAGDSEKKQIKKNFWGVRLFDEGQTAADRRMARTARRRIERRRNRISYLQGIFAEEMSKTDANFFCRLSDSFYVDNEKRNSRHPFFATIEEEVEYHKNYPTIYHLREELVNSSEKADLRLVYLALAHIIKYRGNFLIEGALDTQNTSVDGIYKQFIQTYNQVFASGIEDGSLKKLEDNKDVAKILVEKVTRKEKLERILKLYPGEKSAGMFAQFISLIVGSKGNFQKPFDLIEKSDIECAKDSYEEDLESLLALIGDEYAELFVAAKNAYSAVVLSSIITVAETETNAKLSASMIERFDTHEEDLGELKAFIKLHLPKHYEEIFSNTEKHGYAGYIDGKTKQADFYKYMKMTLENIEGADYFIAKIEKENFLRKQRTFDNGAIPHQLHLEELEAILHQQAKYYPFLKENYDKIKSLVTFRIPYFVGPLANGQSEFAWLTRKADGEIRPWNIEEKVDFGKSAVDFIEKMTNKDTYLPKENVLPKHSLCYQKYLVYNELTKVRYINDQGKTSYFSGQEKEQIFNDLFKQKRKVKKKDLELFLRNMSHVESPTIEGLEDSFNSSYSTYHDLLKVGIKQEILDNPVNTEMLENIVKILTVFEDKRMIKEQLQQFSDVLDGVVLKKLERRHYTGWGRLSAKLLMGIRDKQSHLTILDYLMNDDGLNRNLMQLINDSNLSFKSIIEKEQVTTADKDIQSIVADLAGSPAIKKGILQSLKIVDELVSVMGYPPQTIVVEMARENQTTGKGKNNSRPRYKSLEKAIKEFGSQILKEHPTDNQELRNNRLYLYYLQNGKDMYTGQDLDIHNLSNYDIDHIVPQSFITDNSIDNLVLTSSAGNREKGDDVPPLEIVRKRKVFWEKLYQGNLMSKRKFDYLTKAERGGLTEADKARFIHRQLVETRQITKNVANILHQRFNYEKDDHGNTMKQVRIVTLKSALVSQFRKQFQLYKVRDVNDYHHAHDAYLNGVVANTLLKVYPQLEPEFVYGDYHQFDWFKANKATAKKQFYTNIMLFFAQKDRIIDENGEILWDKKYLDTVKKVMSYRQMNIVKKTEIQKGEFSKATIKPKGNSSKLISRKTNWDPMKYGGLDSPNMAYAVVIEYAKGKNKLVFEKKIIRVTIMERKAFEKDEKAFLEEQGYRQPKVLAKLPKYTLYECEEGRRRMLASANEAQKGNQQVLPNHLVTLLHHVANCEVSDGKSLDYIESNREMFAELLAHVSEFAKRYTLAEANLNKINQLFEQNKEGDIKAIAQSFVDLMAFNAMGAPASFKFFETTIERKRYNNLKELLNSTIIYQSITGLYESRKRLDD

SEQ ID NO: 528 - protein, 953 aa, Listeria ivanovii
MKKMLANIDGADYFIDQIEEENFLRKQRTFDNGTIPHQLHLEELEAILHQQAKYYPFLRKDYEKIRSLVTFRIPYFIGPLANGQSDFAWLTRKADGEIRPWNIEEKVDFGKSAIDFIEKMTNKDTYLPKENVLPKHSLCYQKYMVYNELTKIRYIDDQGKTHHFSGQEKQQIFNGLFKQQRKVKKKDLERFLYTINHIESPTIEGVEDAFNSSFATYHDLQKGGVTQEILDNPLNADMLEEIVKILTVFEDKRMIKEQLQSFSDVLDGTILKKLERRHYTGWGRLSAKLLTGIRDKHSHLTILDYLMNDDGLNRNLMQLINDSNLSFKSIIEKEQVSTADKGIQSIVAELAGSPAIKKGILQSLKIVDELVGIMGYPPQTIVVEMARENQTTGKGKNNSKPRFISLEKAIKEFGSQILKEHPTDNQCLKNDRLYLYYLQNGKDMYTGKELDIHNLSNYDIDHIIPQSFITDNSIDNRVLVSSTANREKGDNVPLLEVVRKRKAFWEKLYQAKLMSKRKFDYLTKAERGGLTEADKANFIQRQLVETRQITKNVANILYQRFNCKQDENGNEVEQVRIVTLKSTLVSQFRKQFQLYKVREVNDYHHAHDAYLNGVVANTLLKVYPQLEPEFVYGDYHQFDWFKANKATAKKQFYTNIMRFFAKENQIIDKNGEILWDNRYLDTIKKVLSYRQMNIVKKTEIQKGEFSNATVNPKGNSSKLISRKADWNPIKYGGFDGSNMAYSIVIEYEKRKKKTVIKKELIQINIMERVAFEKDQKAFLEEKGYYSPKVLTKIPKYTLYECENGRRRMLGSANEAQKGNQMVLPNHLMTLLYHAKNCEANDGESLAYIEMHREMFAELLAYISEFAKRYTLANDRLEKINMFFEQNKKGDIKVIAKSFDKLKVFNAFGAPRDFEFFETTIKRKRYYNIKELLNATIIYQSITGLYEARKRLED

SEQ ID NO: 529 - protein, 232 aa, Listeria ivanovii
MMSKLILGLDIGISSVGWGVLDESTNEVVDAGVRLFEEATRNGNEDRRGFRSARRLKRRRQHRLERAKGLIENNGFSCTDINKFNPYQARYNAIFGEVTKDELAAALFHLVKRRGTTIDAPEEEVKDVENELSTKMQLEKNAKKLATKYDYICEIQLEKLKENKVVRDHENRFRTEDYVKEARAILENQQEYYPEVTNEFIESYMALIETRRMYYDGPGSEKSPTPYGQYFI

SEQ ID NO: 530 - protein, 300 aa, Listeria monocytogenes
DDGLNRNLMQLINDSNLSFKSIIEKEQVSTTDKDLQSIVADLAGSPAIKKGILQSLKIVDELVSIMGYPPQTIVVEMARENQTTVKGKNNSRPRYKSLEKAIKEFGSQILKEHPTDNQELRNNRLYLYYLQNGKDMYTGQELDIHNLSNYDIDHIVPQSFITDNSIDNLVLTSSAGNREKGDDVPPLEIVRKRKVFWEKLFQGNLMSKRKFDYLTKAERGGLTEADKATFIHRQLVETRQITKNVANILHQRFNNETDNHGNNMEQVRIVMLKSALVSQFRKQFQLYKVREVNDYHHAHD

SEQ ID NO: 531 - protein, 782 aa, Listeria monocytogenes
  misc_feature (722)..(722): Xaa can be any naturally occurring amino acid
IFNDLFKQKRKVKKKDLELFLRNINQIESPTIEGLEDSFNASYATYHDLLKVGMKQEILDNPLNTEMLEDIVKILTVFEDKRMIKEQLQQFSDVLDGVVLKKLERRHYTGWGRLSAKLLVGIRDKQSHLTILEYLMNDDGLNRNLMQLINDSNLSFKSIIEKEQVSTTDKDLQSIVADLAGSPAIKKGILQSLKIVDELVSIMGYPPQTIVVEMARENQTTVKGKNNSRPRYKSLEKAIKEFGSQILKEHPTDNQELKNNRLYLYYLQNGKDIYTGQELDIHNLSNYDIDHIVPQSFITDNSIDNLVLTSSAGNREKGDDVPPLEIVRKRKVFWEKLYQGNLMSKRKFDYLTKAERGGLTEADKARFIHRQLVETRQITKNVANILHQRFNNETDNHGNTMEQVRIVTLKSALVSQFRKQFQLYKVREVNDYHHAHDAYLNGVVANTLLKVYPQLEPEFVYGEYHQFDWFKANKATAKKQFYTNIMLFFAQKERIIDENGEILWDKKYLETIKKVLDYRQMNIVKKTEIQKGEFSKATIKPKGNSSKLIPRKENWDPMKYGGLDSPNMAYAVIIEHAKGKKKIVIEKKLIQINIMERKMFEKDEEAFLEEKGYRHPKVLTKLPKYTLYECEKGRRRMLASANEAQKGNQLVLSNHLVSLLYHAKNCEASDGKSLKYTEAHRETFSELLAQVSEFATRYTLADANLSKINNLFEQNKEGDIKXIAQSFVDLMVFNAMGAPASFKFFEATIDRKRYTNLKELLSSTIIYQSITGLYESRKRLDD

SEQ ID NO: 532 - protein, 1334 aa, Listeria monocytogenes; identical to SEQ ID NO: 114

SEQ ID NO: 533 - protein, 1334 aa, Listeria monocytogenes
MKNPYTIGLDIGTNSVGWAVLTDQYDLVKRKMKVAGNSDKKQIKKNFWGVRLFDDGQTAVDRRMNRTARRRIERRRNRISYLQEIFAVEMANIDANFFCRLNDSFYVDSEKRNSRHPFFATIEEEVAYHKNYRTIYHLREELVNSSEKADLRLVYLALAHIIKYRGNFLIEGALDTKNTSVDEVYKQFIQTYNQVFMSNIEEGALAKVEENTEVASILAGKFTRREKFERILRLYPGEKSTGMFAQFISLIVGNKGNFQKVFNLVEKTDIECAKDSYEEDLEALLAIIGDEYAELFVAAKNTYNAVVLSSIITVTATETNAKLSASMIERFDAHEKELGELKAFIKLHLPKQYQEIFNNAEIDGYAGYIDGKTKQVDFYKYLKTTLENVEGADYFITKIEEENFLRKQRTFDNGVIPHQLHLEELEAILHQQAKYYPFLREGYDKIKSLVTFRIPYFVGPLANGQSEFAWLTRKDDGEIRPWNIEEKVDFGKSAVDFIEKMTNKDTYLPKENVLPKHSLCYQKYMVYNELTKIRYIDDQGKTNYFSGREKQQIFNDLFKQKRKVKKKDLELFLRNINHIESPTIEGLEDSFNASYATYHDLLKVGLKQEILDNPLNTEILEDIVKILTVFEDKRMIKEQLEQFSDVLDGVVLKKLERRHYTGWGRLSAKLLVGIRDKQSHLTILDYLMNDDGLNRNLMQLINDSNLSFKSIIEKEQVSTTDKDLQSIVADLAGSPAIKKGILQSLKIVDELVSIMGYPPQTIVVEMARENQTTGKGKNNSKPRYKSLEKAIKDFGSQILKEHPTDNQELKNNRLYLYYLQNGKDIYTGQELDIHNLSNYDIDHIVPQSFITDNSIDNLVLTSSAGNREKGGDVPPLEIVRKRKVFWEKLYQGNLMSKRKFDYLTKAERGGLTEADKARFIHRQLVETRQITKNVANILHQRFNKETDNHGNTMEQVRIVTLKSALVSQFRKQFQLYKVREVNDYHHAHDAYLNGVVANTLLKVYPQLEPEFVYGEYHQFDWFKANKATAKKQFYTNIMLFFAQKERIIDENGEILWDKKYLETIKKVLDYRQINIVKKTEIQKGEFSKATIKPKGNSSKLIPRKENWDPMKYGGLDSPNMAYAVIIEHAKGKKKIVIEKKLIQINIMERKMFEKDEEAFLEEKGYHQPKVLTKLPKYTLYECEKGRRRMLSSANEAQKGNQLVLSNHLVSLLYHAKNCEASDGKSLKYIEAHRETFSELLAQVSEFATKYTLADANLSKINNLFEQNKEGDIKAIAQSFVDLMAFNAMGAPASFKFFEATIDRKRYTNLKELLSSTIIYQSITGLYESRKRLDD

SEQ ID NO: 534 - protein, 1334 aa, Listeria monocytogenes
MKNPYTIGLDIGTNSVGWAVLTDQYDLVKRKMKVAGNSDKKQIKKNFWGVRLFDDGQTAVDRRMNRTARRRIERRRNRISYLQEIFAVEMANIDANFFCRLNDSFYVDSEKRNSRHPFFATIEEEVAYHKNYRTIYHLREELVNSSEKADLRLVYLALAHIIKYRGNFLIEGALDTKNTSVDEVYKQFIQTYNQVFMSNIEEGALAKVEENTEVASILAGKFTRREKFERILRLYPGEKSTGMFAQFISLIVGNKGNFQKVFNLVEKTDIECAKDSYEEDLEALLAIIGDEYAELFVAAKNTYNAVVLSSIITVTATETNAKLSASMIERFDAHEKELGELKAFIKLHLPKQYQEIFNNAEIDGYAGYIDGKTKQVDFYKYLKTTLENVEGADYFITKIEEENFLRKQRTFDNGVIPHQLHLEELEAILHQQAKYYPFLREGYDKIKSLVTFRIPYFVGPLANGQSEFAWLTRKDDGEIRPWNIEEKVDFGKSAVDFIEKMTNKDTYLPKENVLPKHSLCYQKYMVYNELTKIRYIDDQGKTNYFSGREKQQIFNDLFKQKRKVKKKDLELFLRNINHIESPTIEGLEDSFNASYATYHDLLKVGLKQEILDNPLNTEILEDIVKILTVFEDKRMIKEQLEQFSDVLDGVVLKKLERRHYTGWGRLSAKLLVGIRDKQSHLTILDYLMNDDGLNRNLMQLINDSNLSFKSIIEKEQVSTTDKDLQSIVADLAGSPAIKKGILQSLKIVDELVSIMGYPPQTIVVEMARENQTTGKGKNNSKPRYKSLEKAIKDFGSQILKEHPTDNQELKNNRLYLYYLQNGKDIYTGQELDIHNLSNYDIDHIVPQSFITDNSIDNLVLTSSAGNREKGGDVPPLEIVRKRKVFWEKLYQGNLMSKRKFDYLTKAERGGLTEADKARFIHRQLVETRQITKNVANILHQRFNKETDNHGNTMEQVRIVTLKSALVSQFRKQFQLYKVREVNDYHHAHDAYLNGVVANTLLKVYPQLEPEFVYGEYHQFDWFKANKATAKKQFYTNIMLFFAQKERIIDENGEILWDKKYLETIKKVLDYRQINIVKKTEIQKGEFSKATIKPKGNSSKLIPRKENWDPVKYGGLDSPNMAYAVIIEHAKGKKKIVIEKKLIQINIMERKMFEKDEEAFLEEKGYHQPKVLTKLPKYTLYECEKGRRRMLSSANEAQKGNQLVLSNHLVSLLYHAKNCEASDGKSLKYIEAHRETFSELLAQVSEFATKYTLADANLSKINNLFEQNKEGDIKAIAQSFVDLMAFNAMGAPASFKFFEATIDRKRYTNLKELLSSTIIYQSITGLYESRKRLDD

SEQ ID NO: 535 - protein, 1099 aa, Listeria monocytogenes
MKNPYTIGLDIGTNSVGWAVLTDQYDLVKRKMKVAGNSDKKQIKKNFWGVRLFDDGQTAVDRRMNRTARRRIERRRNRISYLQEIFAVEMANIDANFFCRLNDSFYVDSEKRNSRHPFFATIEEEVAYHKNYRTIYHLREELVNSSEKADLRLVYLALAHIIKYRGNFLIEGALDTKNTSVDEVYKQFIQTYNQVFMSNIEEGALAKVEENTEVASILAGKFTRREKFERILRLYPGEKSTGMFAQFISLIVGNKGNFQKVFNLVEKTDIECAKDSYEEDLEALLAIIGDEYAELFVAAKNTYNAVVLSSIITVTATETNAKLSASMIERFDAHEKELGELKAFIKLHLPKQYQEIFNNAEIDGYAGYIDGKTKQVDFYKYLKTTLENVEGADYFITKIEEENFLRKQRTFDNGVIPHQLHLEELEAILHQQAKYYPFLREGYDKIKSLVTFRIPYFVGPLANGQSEFAWLTRKDDGEIRPWNIEEKVDFGKSAVDFIEKMTNKDTYLPKENVLPKHSLCYQKYMVYNELTKIRYIDDQGKTNYFSGREKQQIFNDLFKQKRKVKKKDLELFLRNINHIESPTIEGLEDSFNASYATYHDLLKVGLKQEILDNPLNTEILEDIVKILTVFEDKRMIKEQLEQFSDVLDGVVLKKLERRHYTGWGRLSAKLLVGIRDKQSHLTILDYLMNDDGLNRNLMQLINDSNLSFKSIIEKEQVSTTDKDLQSIVADLAGSPAIKKGILQSLKIVDELVSIMGYPPQTIVVEMARENQTTGKGKNNSKPRYKSLEKAIKDFGSQILKEHPTDNQELKNNRLYLYYLQNGKDIYTGQELDIHNLSNYDIDHIVPQSFITDNSIDNLVLTSSAGNREKGGDVPPLEIVRKRKVFWEKLYQGNLMSKRKFDYLTKAERGGLTEADKARFIHRQLVETRQITKNVANILHQRFNKETDNHGNTMEQVRIVTLKSALVSQFRKQFQLYKVREVNDYHHAHDAYLNGVVANTLLKVYPQLEPEFVYGEYHQFDWFKANKATAKKQFYTNIMLFFAQKERIIDENGEILWDKKYLETIKKVLDYRQINIVKKTEIQKGEFSKATIKPKGIPAN

SEQ ID NO: 536 - protein, 1334 aa, Listeria monocytogenes
MKNPYTIGLDIGTNSVGWAVLTDQYDLVKRKMKVAGNSDKKQIKKNFWGVRLFDEGETAADRRMNRTARRRIERRRNRISYLQEIFALEMANIDANFFCRLNDSFYVDSEKRNSRHPFFATIEEEVAYHKNYRTIYHLREELVNSSEKADLRLVYLALAHIIKYRGNFLIEGALDTKNTSVDGVYKQFIQTYNQVFISNIEEGTLAKMEENTTVADILAGKFTRKEKLERILQLYPGEKSTGMFAQFISLIVGSKGNFQKVFDLVEKTDIECAKDSYEEDLEALLAIIGDEYAELFVAAKNTYNAVVLSSIITVTDTETNAKLSASMIERFDAHEKDLSELKAFIKLHLPKQYEEIFSNVAIDGYAGYIDGKTKQVDFYKYLKTLLENIEGADYFIAKIEEENFLRKQRTFDNGAIPHQLHLEELEAILHQQAKYYPFLKEAYDKIKSLVTFRIPYFVGPLANGQSDFAWLTRKADGEIRPWNIEEKVDFGKSAVDFIEKMTNKDTYLPKENVLPKHSLYYQKYMVYNELTKVRYIDDQGKTNYFSGQEKQQIFNDYFKQKRKVSKKDLEQFLRNMSHIESPTIEGLEDSFNSSYATYHDLLKVGIKQEVLENPLNTEMLEDIVKILTVFEDKRMIKEQLQQFSDVLDGAVLKKLERRHYTGWGRLSAKLLVGIRDKQSHLTILDYLMNDDGLNRNLMQLINDSNLSFKSIIEKEQVSTTDKDLQSIVADLAGSPAIKKGILQSLKIVDELVSIMGYPPQTIVVEMARENQTTVKGKNNSRPRYKSLEKAIKEFGSQILKEHPTDNQELRNNRLYLYYLQNGKDMYTGQELDIHNLSNYDIDHIVPQSFITDNSIDNLVLTSSAGNREKGDDVPPLEIVRKRKVFWEKLFQGNLMSKRKFDYLTKAERGGLTEADKATFIHRQLVETRQITKNVANILHQRFNNETDNHGNNMEQVRIVMLKSALVSQFRKQFQLYKVREVNDYHHAHDAYLNGVVANTLLKVYPQLEPEFVYGEYHQFDWFKANKATAKKQFYTNIMLFFAQKERIIDENGEILWDKKYLETIKKVLDYRQMNIVKKTEIQKGEFSKATIKPKGNSSKLIPRKENWDPMKYGGLDSPNMAYAVIIEHAKGKKKVVFEKKIIRITIMERKAFEKDEKSFLEKQGYRQPKVLTKLPKYTLYECENGRRRMLASANEAQKGNQQVLKGQLITLLHHAKNCEASDGKSLDYIESNREMFGELLAHVSEFAKRYTLADANLSKINQLFEQNKDNDIKVIAQSFVNLMAFNAMGAPASFKFFEATIERKRYTNLKELLSATIIYQSITGLYEARKRLDG

SEQ ID NO: 537 - protein, 1334 aa, Listeria monocytogenes
MKNPYTIGLDIGTNSVGWAVLTNQYDLVKRKMKVAGNSDKKQIKKNFWGVRLFDDGQTAVDRRMNRTARRRIERRRNRISYLQEIFAVEMANIDANFFCRLNDSFYVDSEKRNSRHPFFATIEEEVAYHKNYRTIYHLREELVNSSEKADLRLVYLALAHIIKYRGNFLIEGALDTKNTSVDGVYEQFIQTYNQVFMSNIEEGTLAKVEENIEVANILAGKFTRREKFERILQLYPGEKSTGMFAQFISLIVGSKGNFQKVFDLIEKTDIECAKDSYEEDLEALLAIIGDEYAELFVAAKNTYNAVVLSSIITVTATETNAKLSASMIERFDAHEKDLGELKAFIKLHLPKQYQEIFNNAAIDGYAGYIDGKTKQVDFYKYLKTILENIEGADYFIAKIEEENFLRKQRTFDNGAIPHQLHLEELEAIIHQQAKYYPFLREDYEKIKSLVTFRIPYFVGPLAKGQSEFAWLTRKADGEIRPWNIEEKVDFGKSAVDFIEKMTNKDTYLPKENVLPKHSLCYQKYMVYNELTKVRYIDDQGKTNYFSGQEKQQIFNDLFKQKRKVKKKDLELFLRNINHIESPTIEGLEDSFNASYATYHDLLKVGMKQEILDNPLNTEMLEDIVKILTVFEDKPMIKEQLQQFSDVLDGGVLKKLERRHYTGWGRLSAKLLVGIREKQSHLTILDYLMNDDGLNRNLMQLINDSNLSFKSIIEKEQVSTTDKDLQSIVADLAGSPAIKKGILQSLKIVDELVSIMGYPPQTIVVEMARENQTTGKGKNNSKPRYKSLEKAIKEFGSKILKEHPTDNQELKNNRLYLYYLQNGKDMYTGQELDIHNLSNYDIDHIVPQSFITDNSIDNLVLTSSAGNREKGGDVPPLEIVRKRKVFWEKLYQGNLMSKRKFDYLTKAERGGLTDADKARFIHRQLVETRQITKNVANILHQRFNNETDNHGNTMEQVRIVTLKSALVSQFRKQFQLYKVREVNDYHHAHDAYLNGVVANTLLKVYPQLEPEFVYGEYHQFDWFKANKATAKKQFYTNIMLFFGQKERIIDENGEILWDKKYLETIKKVLDYRQMNIVKKTEIQKGEFSKATIKPKGNSSKLIPRKENWDPMKYGGLDSPNMAYAVIIEHAKGKKKLIFEKKIIRITIMERKMFEKDEEAFLEEKGYRHPKVLTKLPKYTLYECEKGRRRMLASANEAQKGNQLVLSNHLVSLLYHAKNCEASDGKSLKYIEAHRETFSELLAQVSEFATRYTLADANLSKINNLFEQNKEGDIQAIAQSFVDLMAFNAMGAPASFKFFEATIDRKRYTNLKELLSSTIIYQSITGLYESRKRLDD

SEQ ID NO: 538 - protein, 874 aa, Listeria seeligeri; identical to SEQ ID NO: 180

SEQ ID NO: 539 - protein, 1087 aa, Listeriaceae bacterium
MKKLVLGLDIGVASVGWGIIDAENGDVVDTGVRLFSSRDASENESRRTSRQSRRLSRRKKHRRERIKQLLLAHDMDICDIVNENPYELRVKGLNEKLEVSEIYVALTHLAKRRGVSYLDDVVEEGGTIKSEHLNKNMEEIKSGKMPCEIQLERFEKYGQVRGMIEINQDTEESSFLVNIFRTSDYIKEAKTILATQQKFHKQITNEFIDEYIHIMASKRDYFIGPGNEKSRTDYGVYRTNGDTWDNLFEILIGKCSVFPEETRAARSSYVAQEFNLLNDLNNLKISNLESGKLSASQKHDIVEKVKNSKKFGTKDLLKYIASVCECKIEDIGGCRVDKNRKPIMHTFENYRKVHNALNEAGVDLRLSETDYDELMKIMTLNSETLEIKKQCKEKLPQLTEDYLNVCLVLNKKGAFSGWHALSLKAMKLMMPELYGTSKNQMQIIHTMQLGKAYLKPLNQQKYLNSEAILEEIYNPIAARSIRQTIKVTNAILKKYGHLDSVIIEMPRDYQTSEDERKMIEKMQKENEKEKKAALKRAREEYPFPDEAFRNHKELATKLRLWYQQDQFCVYSGRKISVVDLVRNPNQFEIDHIIPQSVSLDDSLNNKVLCFSEENQKKGQQTPFYYHKGKSGNWTYEQYKLFVEKLFDKKKISNKKRELLLFEEDINKWDVRRGFIARNLVDTRYASRVILNSYQQYFGNHEMGTKVKVVRGKFTSQLRKKWRIFKDRNESHSHHAIDALIVAATANLRLWKKNTLGVSDEGKVYDKETGEILPFEKLTESEYNEMMNKEPYLNFKTKLQNIETKVKYSYRVSKKVNRKISDATIYSTRERDGIDYIVGKIKNIYDVKTYKDQFLKRYKKNKEQFLMYQHDPQTFAILENIMATYQDAENPFLAYKKEYGVIRKYSKKGGGSPVTSLKFIDKVLGQKIDLTAKNQAALPKNKKVVLQSITPYRADVYYDEIDKRYHLIGVKYSLFSFSKQGYVINPIAYQKLLEKEQIHSEMKFCFSLYREDIIEFGEDPDSLTRYRFWSKNESGKNKIEVKPIEKPNFEKQTVLTITKKIKILNKYQTDVLGNSFKAQEEKDPRNIE

SEQ ID NO: 540 - protein, 1345 aa, Marinilabilia sp.
MKKILGLDLGTTSIGWAFIKEPEKDVVGSEIVDMGVRIVALSSDEENDFAKGNTISINADRTLKRGARRNLQRFKLRRDALLEIFKEMKLIPSNFKYAEDGPSSTFSTLKLRDKAAKEKIELDDLVKVLLQINKKRGYRSSRKAKSEEDDGSAIDSMGIAKELYENDLTPGQWVFEALQKGRKNVPDFYRSDLQEEFKKIVNYQSEFYPDVLNSSFVEDWMGKASTPTKQYFNKKGVHLAENKGKREERRLQEYNWRAVAVNSKIDLSEIALILSQINSQISNSSGYLGAISDRSKELYFKNQTVGQYLYQQIKINPHTRLKGQVFYRQDYLDEFEKIWSVQSGFHPQLNDALKKEIRDITIFFQRRLKSQKHLISNCEFEDYHKVVPKSHPIFQEFRIWQNLNNLTLIKKDNLNEKSELALEDKIALANELAFKREQSVKDALNILGLKSSEWEFNFTKIEGNRTNHAFFEAFAKIIEIEDGEPLDLGNLKADDILDQFSEAFLRIGIDPGLLQVNNDIEGPNYEKQPYIQFWHLLYSSEDDQKLKQNLIKKFGFKPDHAKILASISLQDDHASLSSRAIKKILPHLQSGLIYDKACTYAGYNHSSSFTKEENEKRELSSELDLLKKNSLRNPVVEKILNQMINVVNAILKDPNLGKPDEIRVEMARELKANAEQRKNMTSNIASATRDHEKYREILKKEFGLKRVTKNDLLRYKLWLETDGISLYTGKPIEASKLFSKEYDIEHIIPKTRLFDDSFSNKTICERQLNIDKANVTAFSFLQNKLSGDEFEQYQSRVKSLFGKLSKAKIQKLLMANDKIPEDFIARQLQETRYISKKAKEILFEITRRVSVTTGTITDKLREDWGLVEIMKELNWEKYDKLGLTYTIEGKHGERLNKIKDWSKRNDHRHHAMDALTVALTKPAYIQYLNNLNAKELNGKKSTEIFAIEQKYLKRENGKLCFIPPVENIRTEAKKHLSKVLISYKAKNKVVTINKNRTNKKAGFNEQIALTPRGQLHKETVYGKAFHYSTKFEKIGASFDVQKINAVAKKEEREALLKRLAENGDDPKKAFTGKNSLSKMPIYLDLKRNIKLPEKVKTVVLEQNYTIRKNIDPDLKLDKVIDVGVKRILENRLKEFGGNAKLALSNLDENPIWLNKEKGITIKRVKISGVSNVESLHVKKDHFGEPILDQVGNEIPVDFVSTGNNHHVAIYEDEKGNLQEEVVSFFEAVVRQNQGLPIINKNHSLGWKFLFTLKQNEYFVFPSDDFDPTDVDLMDEENYHLISPNLFRVQKFTTKDYFFRHHLETTVEDKSELKGVSFKRLGLPGLNCIKKIRINHLGKIIQVGEY

SEQ ID NO: 541 - protein, 1091 aa, Mobiluncus mulieris
MDSRKYRVGIDVGTNSVGFAAVEEDDSGSPTRFLNTMVVIHDSGVDSEQKKYAITRLASAGTARRTRRLYRTRRQRLRELDDFISNELGYPLVNLENFADPYEPWKVRADLATTKLPNDELPEAMSIALRHMARHRGWRSPYQRVEALHLHAEISKEFAALKERVVEKTGDVFSDDATPAEVLVDLMGRQKVRGADGVLSGKLRQSDNANELRKIASVQGIDDETLNRIIDRVFSSKSPKGKASERVGMDALPGQGSKPRALKAMPSFQKFRVVSVICNLRIKDSGGDARPLSMEEKEKLIDYLMSSTTDDHVTWTDVADLLHVKRSQLQGTAKEGFDGERPYTRPPVNSTWSKIKDSKIKSLVALWKTGDVDVQSAIVEALSNASVLEDSRPGADIVVAYLESLDDKELESLDKVGLPAGRASYSEDSLERLTERMLRDDCDLFEARKREFNVADDWKPPADPIYAPVGNPGVDRVLKIVNRLLMAAEREWGAPTQINIEHVRSGFSSELMQREFERENERRRAQNEEAVKAILTEKGGNSRVSKYDITRYYAVKRQHCQCLYCGTPITFSDCELDHIVPRKGVGSTNTRVNLAAACRSCNRDKSNLPFAVWAGKASNFDVSIDDAVSRVKQWQRSQNEGVREFRAFQNEVISRLLKTTEDPEIDSRSLESVAWMARELHHRVEYYFQSKGAQTQVSVYRGAVTAQARKSSGLEDKVKMIGGGGKTRLDRRHHAMDAATIALMTPGISTTLSEKNNLRDAQKFTGQSETWKDYCGRTETARKHFAVWKSNMERLTDLFNDKLENDAIPVVQPLRLRLSNSKAHDDGIGKLDSKKLGSVWSLADIDRAATPQIWTALTRCDDFDPTKGLPENANRVIRAQGVKYESEDNIPVFPSNVAAIAVRDGYAEIGSTIHHARIYRIDDGKKTFYSMIRVFAVDLLKHQAEDLFTVKLPPSAISIRTCEDSLRRALSNGTAEYLGWLVPGDEIIVDTSDKAFHTGQIGDLLRNFPVNSFRLTGFPSNSRLRLKPVLLAGEGLRDDAEDSIKKILLGQGWRPAINVLFSKGKPRIVRRNSLGIERPSSNNGLPFSWEA

SEQ ID NO: 542 - protein, 1233 aa, Mycoplasma canis
MEKKRKVTLGFDLGIASIGWAIVDSETNQVYKLGSRLFDAPDTNLERRTQRGTRRLLRRRKYRNQKFYNLVKRTEVFGLSSREAIENRFRELSIKYPNIIELKTKALSQEVCPDEIAWILHDYLKNRGYFYDEKETKEDFDQQTVESMPSYKLNEFYKKYGYFKGALSQPTESEMKDNKDLKEAFFFDFSNKEWLKEINYFFNVQKNILSETFIEEFKKIFSFTRDISKGPGSDNMPSPYGIFGEFGDNGQGGRYEHIWDKNIGKCSIFTNEQRAPKYLPSALIFNFLNELANIRLYSTDKKNIQPLWKLSSIDKLNILLNLFNLPISEKKKKLTNANINDIVKKESTKSIMLSVEDIDMIKDEWAGKEPNVYGVGLSGLNIEESAKENKFKFQDLKILNVLINLLDNVGIKFEFKDRNDIIKNLELLDNLYLFLIYQKESNNKDSSIDLFIAKNELLNIENLKLKLKEFLLGAGNEFENHNSKTHSLSKKAIDAILPKLLDNNEGWNLEAIKNYDEEIKSQIEDNSSLMAKQDKKYLNDNFLKDAILPPNVKVTFQQAILIFNKIIQKFSKDFEIDKVVIELAREMTQDQENDALKGIAKAQKSKKSLVEERLEANNIDKSVFNDKYEKLIYKIFLWISQDFKDPYTGAQISTNEIVNNKVEIDHIIPYSLCFDDSSANKVLVHKQSNQEKSNSLPYEYIKQGHSGWNWDEFTKYVKRVFVNNVDSILSKKERLKKSENLLTTSYDGYDKLGFLARNLNDTRYATILFRDQLNNYAEHHLIDNKKMFKVIAMNGAVTSFIRKNMSYDNKLRLKDRSDFSHHAYDAAIIALFSNKTKTLYNLIDPSLNGIISKRSEGYWVIEDRYTGEIKELKKEDWTSIKNNVQARKIAKEIEEYLIDLDDEVFFSRKTKRKTNRQLYNETIYGIAAKTDEDGITNYYKKEKFSILDDKDIYLRLLREREKFVINQSNPEVIDQIIEIIESYGKENNIPSRDEAINIKYTKNKINYNLYLKQYMRSLTKSLDQFSEEFINQMIANKTFVLYNPTKNTTRKIKFLRLVNDVKINDIRKNQVINKFNGKNNEPKAFYENINSLGAIVFKNSANNFKTLSINTQIAIFGDKNWDIEDFKTYNMEKIEKYKEIYGIDKTYNFHSFIFPGTILLDKQNKEFYYISSIQTVRDIIEIKFLNKIEFKDENKNPDTSKTPKRLMFGIKSIMNNYEQVDISPFGINKKIFE

SEQ ID NO: 543 - protein, 1233 aa, Mycoplasma canis
MEKKRKVTLGFDLGIASVGWAIVDSETNQVYKLGSRLFDAPDTNLERRTQRGTRRLLRRRKYRNQKFYNLVKRTEVFGLSSREAIENRFRELSIKYPNIIELKTKALSQEVCPDEIAWILHDYLKNRGYFYDEKETKEDFDQQTIESMPSYKLNEFYKKYGYFKGALSQPTESEMKDNKDLKEAFFFDFSNKEWLKEINYFFNVQKNILSETFIEEFKKIFSFTRDISKGPGSDNMPSPYGIFGEFGDNGQGGRYEHIWDKNIGKCSIFTNEQRAPKYLPSALIFNFLNELANIRLYSTDKKNIQPLWKLSSIDKLNILLNLFNLPISEKKKKLTSANINDIVKKESTKSIMLSVEDIDMIKDEWAGKEPNVYGVGLSGLNIEESAKENKFKFQDLKILNVLINLLDNVGIKFEFKDRNDIIKNLELLDNLYLFLIYQKESNNKDSSIDLFIAKNESLNIENLKLKLKEFLLGAGNEFENHNSKTHSLSKKAIDAILPKLLDNNEGWNLEAIKNYDEEIKSQIEDNSFLMAKQDKKYLNDNFLKDAILPPNVKVTFQQAILIFNKIIQKFSKDFEIDKVVIELAREMTQDQENDALKGIAKAQKSKKSLVEERLEANNIDKSVFNEKYEKLIYKIFLWISQDFKDPYTGAKISANEIVDNKVEIDHIIPYSLCFDDSSANKVLVHKQSNQEKSNSLPYEYIKQGHSGWNWDEFTKYVKRVFVNNVDSILSKKERLKKSENLLTTSYDGYDKLGFLARNLNDTRYATILFRDQLNNYAEHHLIDDKKMFKVIAMNGAVTSFIRKNMSYDNKLRLKNRNDFSHHAYDAAIIALFSNKTKTLYNLIDPSLNGIISKRSEGYWVIEDRYTGEIKELKKEDWTSIKNNVQARKIAKEIEEYLIDLDDEVFFSRKTKRKTNRQLYNETIYGIAAKTDEDGITNYYKKEKLSILDDKDIYLRLLREREKFVINQSNPEVIDQIIEIIESYGKENNIPSRDEAINIKYTKNKINYNLYLKQYMRSLTKSLDQFSEEFINQMIANKTFVLYNPTKNTTRKIKFLRLVNDVKINDIRKNQVINKFNGKNNEPKAFYENINSLGAIVFKNSANNFKTLSINTQIAIFGDKNWDIEDFKTYNMEKIEKYKEIYGIDKTYNFHSFIFPGTILLDKQNKEFYYISSIQTVRDIIEIKFLNKIEFKDENKNQDTSKTPKRLMFGIKSIMNNYEQVDISPFGINKKIFE

SEQ ID NO: 544 - protein, 1233 aa, Mycoplasma canis; identical to SEQ ID NO: 247

SEQ ID NO: 545 - protein, 1233 aa, Mycoplasma canis
MEKKRKVTLGFDLGIASVGWAIVDSETNQVYKLGSRLFDAPDTNLERRTQRGTRRLLRRRKYRNQKFYNLVKRTEVFGLSSREAIENRFRELSIKYPNIIELKTKALSQEVCPDEIAWILHDYLKNRGYFYDEKETKEDFDQQTVESMPSYKLNEFYKKYGYFKGALSQPTESEMKDNKDLKEAFFFDFSNKEWLKEINYFFNVQKNILSETFIEEFKKIFSFTRDISKGPGSDNMPSPYGIFGEFGDNGQGGRYEHIWDKNIGKCSIFTNEQRAPKYLPSALIFNFLNELANIRLYSTDKKNIQPLWKLSSVDKLNILLNLFNLPISEKKKKLTSTNINDIVKKESIKSIMISVEDIDMIKDEWAGKEPNVYGVGLSGLNIEENAKENKFKFQDLKILNVLINLLDNVGIKFEFKDRNDIIKNLELLDNLYLFLIYQKESNNKDSSIDLFIAKNKSLNIENLKLKLKEFLLGAGNEFENHNSKSHSLSKKAIDAILPKLLDNNEGWNLEAIKNYDEEIKSQIEDNSSLMAKQDKKYLNDNFLKDAILPPNVKVTFQQAILIFNKIIQKFSKDFEIDKVVIELAREMTQDQENDALKGMAKAQKSKKSLVEERLEANNIDKSVFNDKYEKLIYKIFLWISQDFKDPYTGAQISVNEIVNNKVEIDHIIPYSLCFDDSSANKVLVHKQSNQEKSNSLPYEYIKQGHSGWNWDEFTKYVKRVFVNNVDSILSKKERLKKSENLLTTSYDGYDKLGFLARNLNDTRYATILFRDQLNNYAEHHLIDNKKMFKVIAMNGAVTSFIRKNMSYDNKLRLKDRSDFSHHAYDAAIIALFSNKTKTLYNLIDPSLNGIISKRSEGYWVIEDRYTGEIKELKKEDWTSIKNNVQARKIAKEIEEYLIDLDDEVFFSRKTKRKTNRQLYNETIYGIAAKTDEDGITNYYKKEKFSILDDKDIYLRLLREREKFVINQSNPEVIDQIIEIIESYGKENNIPSRDEAINIKYTKNKINYNLYLKQYMRSLTKSLDKFSEEFINQMIANKTFVLYNPTKNTTRKIKFLRLVNDVKINDIRKNQVINKFNGKNNEPKAFYENINSLGAIVFKNSANNFKTLSINTQIAIFGDKNWDIEDFKTYNMEKIEKYKEIYGIDKTYNFHSFIFPGTILLDKQNKEFYYISSIQTVRDIIEIKFLNKIEFKDENKNQDTSKTPKRLMFGIKSIMNNYEQVDISPFGINKKIFE

SEQ ID NO: 546 - protein, 1233 aa, Mycoplasma canis
MEKKRKVTLGFDLGIASVGWAIVDSETNQVYKLGSRLFDAPDTNLERRTQRGTRRLLRRRKYRNQKFYNLVKRTEVFGLSSREAIENRFRELSIKYPNIIELKTKALSQEVCPDEIAWILHDYLKNRGYFYDEKETKEDFDQQTVESMPSYKLNEFYKKYGYFKGALSQPTESEMKDNKDLKEAFFFDFSNKEWLKEINYFFNVQKNILSETFIEEFKKIFSFTRDISKGPGSDNMPSPYGIFGEFGDNGQGGRYEHIWDKNIGKCSIFTNEQRAPKYLPSALIFNFLNELANIRLYSTDKKNIQPLWKLSSVDKLNILLNLFNLPISEKKKKLTSTNINDIVKKESIKSIMLSVEDIDMIKYEWAGKEPNVYGVGLSGLNIEESAKENKFKFQDLKILNVLINLLDNVGIKFEFKDRNDIIKNLELLDNLYLFLIYQKESNNKDSSIDLFIAKNKSLNIENLKLKLKEFLLGAGNEFENHNSKTHSLSKKAIDAILPKLLDNNEGWNLEAIKNYDEEIKSQIEDNSSLMAKQDKKYLNDNFLKDAILPPNVKVTFQQAILIFNKIIQKFSKDFEIDKVVIELAREMTQDQENDALKGIAKAQKSKKSLVEERLEANNIDKSVFDDKYEKLIYKIFLWISQDFKDPYTGAKISANEIVNNKVEIDHIIPYSLCFDDSSANKVLVHKQSNQEKSNSLPYEYIKQGHSGWNWDEFTKYVKRVFVNNVDSILSKKERLKKSENLLTTSYDGYDKLGFLARNLNDTRYATILFRDQLNNYAEHHLIDNKKMFKVIAMNGAVTSFIRKNMSYDNKLRLKDRSDFSHHAYDAAIIALFSNKTKTLYNLIDPSLNGIISKRSEGYWVIEDRYTGEIKELKKEDWTSIKNNVQARKIAKEIEEYLIDLDDEVFFSRKTKRKTNRQLYNETIYGIAAKTDEDGITNYYKKEKFSILDDKDIYLRLLREREKFVINQSNPEVIDQIIEIIESYGKENNIPSRDEAINIKYTKNKINYNLYLKQYMRSLTKSLDQFSEEFINQMIANKTFVLYNPTKNTTRKIKFLRLVNDVKINDIRKNQVINKFNGKNNEPKAFYENINSLGAIVFKNSANNFKTLSINTQIAIFGDKNWDIEDFKTYNMEKIEKYKEIYGIDKTYNFHSFIFPGTILLDKQNKEFYYISSIQTVRDIIEIKFLNKIEFKDENKNQDTSKTPKRLMFGIKSIMNNYEQVDISPFGINKKIFE

SEQ ID NO: 547 - protein, 1239 aa, Mycoplasma cynos
MEEKRKVTLGFDLGVASVGWAIVDSETNEVYKLGSRLFDIPDTNIDRRAKRGSRRLVRRRSYRNQKFYNLIKRTKTFGFLDKEAIEKEFVLLSIKYPNIIELKVKGLQEEVSKSEAVWILHDYLKNRGYFYDDKEEKDDLENPSIESMPSYKLYEFYKEYGYFKGALSSPTESEKNKDSDLEKAIFFNFSNKEWTKEINHFFKIQKNIFSEDFKAKFMEFFSFIRDISKGPGSENMPSQYSIFGKYGDDGMGGKYQHIWDKNIGKCSIFKDKVRAPKYLPSALFFNLLNELSNIRLYSVDKREKSVLWRLSSKDKINIILNILQIILFKNDGKISNLDINKIVKNESIKSIILNEIDLDLIKDMWFEKEPNVYGIGLSGLNIEENKKENRFKFQDLKIFSVFIDLLKKSNINIEFNNEKDIIHNLKLLDELYFFLITQKYSRDKYGSIKKFILNNKSFNIDNLDEKLNIFLSISDDEFDNHNSKTHSLSKEAIYFIFPKLLHNNEGWNLEAIKNYDIDVREEISKHSFGIKKQDKKYLDDAFLDDAILPPSVKVTIKQSILIFNKIIKKFSNKFQIDNVVIELAREMTQEKEMDAQKSLNRLKKSRKKIIEERLNANNIDSKMFRDKTGEISPNYIYKIYLWISQNFKDPYTGENISANDILKNNVEIDHIIPYSLCFDDSSSNKVLVFKHSNQSKGNFLPFDMISTFSENSVWNWKEYTQYVEKTFKTNLESILDKKERVKKADNLLTSSYDGYDKLGFLARNLNDTRYATILFRDQLINYSENHLIDSKKMFKVIAMNGGVTSFIRKNMSFDSGLKVKDRSIFSHHAYDAAIIALFSNKTKILYNLINPSLDGIISKRSEGYWVLEDRLTGEIRKLNYNDWQSIKNNVEVKKIAREIESHLSNLDNVVMFSRKSKRKTNKELYNETLYGIATRIDENGIKNYYKKEKFNILEDENIYLRLLNERENFIINRSNPEVIDAIIEIFETIDKNKIPARDVAKNIKYTDNKIKYNLYLKDYMRKLVDEFPDKFRKDFIEQMIAKKIFILFNPIKNTTRKIKSLRSINNNKIEDIRKKQVLEKFNTAKNEPRSFYESLNSLGAIIFKNNLNIYKKMSISSQIATFGDKNWKIDDINTYNKEKLNKYKEIYGIDETYDFYSFIFPGTILLDEKNKEFLYISSIQTLKDKIELKFLDRIEFEKKNVNSNLKPKIKREIISTKKLMSDYKIIKISPLGINKKIFE

SEQ ID NO: 548 - protein, 1269 aa, Mycoplasma gallisepticum
MNNSIKSKPEVTIGLDLGVGSVGWAIVDNETNIIHHLGSRLFSQAKTAEDRRSFRGARRLIRRRKYKLKRFINLIWKYNSYFGFKNKEDILNNYQEQQKLHNTVLNLKLEALNAKIDPKALSWILHDYLKNRGHFYEDNRDFNVYPTEELANYFGEYGYYKGIIDSKEDNDDKLEEGLTKYKFSNQHWLEEIKKVLSNQTGLPEKFKEEYESLFSYVRNYSEGPGSINSVSPYGIYHLDEKEGKVVQKYNNIWDKTIGKCSIFPDEYRAPKNSPIAMIFNEINELSTIRSYSIYLTGWFINQEFKKAYLNKLLDLLIKTNSEKPIDARQFKKLREETIAESIGKETLKDVEREEKLEKEDHKWKLKGLKLNTNGKIQYNDLSSLAKFVHKLKQHLKLDFLLEDQYTTLDKINFLQSLFVYLGKHLRYSNRVDSANLKEFSDSNKLFERVLQEQKDDLFKLFEQTDKDDEKILAQTHSLSTKAMLLAITRMTNLDNDEDNQKNNDKGWNFEAIKNFDQKFIDITKKNNNLSLKQDKRYLDDRFINDAILSPGVKRILREATKVFNAILKQFSEEYDVTKVVIELARELSEEKELENTKNYEKLIKKNSDKISERLEALDIAEDKIEDILKSPTKSYKVLLWLQQDHIDPYSQKEIAFEDILTKTEKTEIDHIIPYSISFDDSSSNKLLVLAESNQAKSNQTPYEFITSGNAGIKWEDYEAYCRKFKDGDTSLLDSTQRSKKFAKMMKTDTSSKYDIGFLARNLNDTRYATIVFRDALKDYANNHLVEDKPMFKVVCINGGVTSFLRKNFDKSWYAKKDRDKNIHHAVDASIISIFSNETKTLFNQLTQFADYKLFKNTDGSWKKIDPKTGVVTEVTDENWKQIRVRNQVSEIAKVINKCIQDSNIERKARYSRKIENKTNISLFNDTVYSAKKVGYEDQIKRKNLKTLDIHESAEENKNSKVKKQFVYRKLVNVSLLNNDKLADLFAEKEDILMYRANPWVINLAEQIFNEYTENKKIKSQNVFEKYMLDLTKEFPEKFSEAFVKSMLRNKTAIIYNVEKKVVHRIKRLKILSSELKENKLSNVIIRSKNESGTKLSYQDTINSIALMIMRSIDPTAKKQYIRVPLNTLNLHLGDQDFDLHNIDAYLKKPKFVKYLKANEIGDEYKPWRVLTSGTLLIHKKDKKLMYISSFQNLKDVIEIKNLIETEYKENDDSDPKKKKKANRFLMTLSTILNDYILLDAKDNFDILGLSKNRIDEILNSKLGLDKITK

SEQ ID NO: 549 - protein, 1224 aa, Mycoplasma gallisepticum
MNNSIKSKPEVTIGLDLGVGSVGWAIVDNETNIIHHLGSRLFSQAKTAEDRRSFRGARRLIRRRKYKLKRFINLIWKYNSYFGFKNKEDILNNYQEQQKLHNTVLNLKLEALNAKIDPKALSWILHDYLKNRGHFYEDNRDFNVYPTEELANYFGEYGYYKGIIDSKEDNDDKLEEGLTKYKFSNQHWLEEIKKVLSNQTGLPEKFKEEYESLFSYVRNYSEGPGSINSVSPYGIYHLDEKEGKVVQKYNNIWDKTIGKCSIFPDEYRAPKNSPIAMIFNEINELSTIRSYSIYLTGWFINQEFKKAYLNKLLDLLIKTNSEKPIDARQFKKLREETIAESIGKETLKDVEREEKLEKEDHKWKLKGLKLNTNGKIQYNDLSSLAKFVHKLKQHLKLDFLLEDQYTTLDKINFLQSLFVYLGKHLRYSNRVDSANLKEFSDSNKLFERVLQEQKDDLFKLFEQTDKDDEKILAQTHSLSTKAMLLAITRMTNLDNDEDNQKNNDKGWNFEAIKNFDQKFIDITKKNNNLSLKQDKRYLDDRFINDAILSPGVKRILREATKVFNAILKQFSEEYDVTKVVIELARELSEEKELENTKNYEKLIKKNSDKISERLEALDIAEDKIEDILKSPTKSYKVLLWLQQDHIDPYSQKEIAFEDILTKTEKTEIDHIIPYSISFDDSSSNKLLVLAESNQAKSNQTPYEFITSGNAGIKWEDYEAYCRKFKDGDTSLLDSTQRSKKFAKMMKTDTSSKYDIGFLARNLNDTRYATIVFRDALKDYANNHLVEDKPMFKVVCINGGVTSFLRKNFDKSWYAKKDRDKNIHHAVDASIISIFSNETKTLFNQLTQFADYKLFKNTDGSWKKIDPKTGVVTEVTDENWKQIRVRNQVSEIAKVINKCIQDSNIERKARYSRKIENKTNISLFNDTVYSAKKVGYEDQIKRKNLKTLDIHESAEENKNSKVKKQFVYRKLVNVSLLNNDKLADLFAEKEDILMYRANPWVINLAEQIFNEYTENKKIKSQNVFEKYMLDLTKEFPEKFSEAFVKSMLRNKTAIIYNVEKKVVHRIKRLKILSSELKENKLSNVIIRSKNESGTKLSYQDTINSIALMIMRSIDPTAKKQYIRVPLNTLNLHLGDQDFDLHNIDAYLKKPKFVKYLKANEIGDEYKPWRVLTSGTLLIHKKDKKLMYISSFQNLKDVIEIKNLIETEYKENDDSDPKKRRKQIGS

SEQ ID NO: 550 - protein, 1269 aa, Mycoplasma gallisepticum; identical to SEQ ID NO: 138

SEQ ID NO: 551 - protein, 226 aa, Mycoplasma iowae
MSNKKKITIGLDIGVSSVGWSILREDNVLIDYGSRLFPDAANAKDGKLENEARRSHRSMRRRIRRIKTRKNDLIKLLIKYNIISDQDELAKILEQGIVNETGNVPIVEIKYKGLKEKLSKEELLICLYHYIHKRGYFYITEEDLKENGENINRLPTEIQYDFYMKNGYYIGNEDNQKFSNLIWVKEIEKFLSKQSLDSNFVDEYISLFRRVRDYSDGPGSEKSPTP

SEQ ID NO: 552 - protein, 1304 aa, Mycoplasma synoviae
MLNNVQNLWKYLLLLIFDKKIIFLFKIKVILIRRYMENNNKEKIVIGFDLGVASVGWSIVNAETKEVIDLGVRLFSEPEKADYRRAKRTTRRLLRRKKFKREKFHKLILKNAEIFGLQSRNEILNVYKDQSSKYRNILKLKINALKEEIKPSELVWILRDYLQNRGYFYKNEKLTDEFVSNSFPSKKLHEHYEKYGFFRGSVKLDNKLDNKKDKAKEKDEEEESDAKKESEELIFSNKQWINEIVKVFENQSYLTESFKEEYLKLFNYVRPFNKGPGSKNSRTAYGVFSTDIDPETNKFKDYSNIWDKTIGKCSLFEEEIRAPKNLPSALIFNLQNEICTIKNEFTEFKNWWLNAEQKSEILKFVFTELFNWKDKKYSDKKFNKNLQDKIKKYLLNFALENFNLNEEILKNRDLENDTVLGLKGVKYYEKSNATADAALEFSSLKPLYVFIKFLKEKKLDLNYLLGLENTEILYFLDSIYLAISYSSDLKERNEWFKKLLKELYPKIKNNNLEIIENVEDIFEITDQEKFESFSKTHSLSREAFNHIIPLLLSNNEGKNYESLKHSNEELKKRTEKAELKAQQNQKYLKDNFLKEALVPLSVKTSVLQAIKIFNQIIKNFGKKYEISQVVIEMARELTKPNLEKLLNNATNSNIKILKEKLDQTEKFDDFTKKKFIDKIENSVVFRNKLFLWFEQDRKDPYTQLDIKINEIEDETEIDHVIPYSKSADDSWFNKLLVKKSTNQLKKNKTVWEYYQNESDPEAKWNKFVAWAKRIYLVQKSDKESKDNSEKNSIFKNKKPNLKFKNITKKLFDPYKDLGFLARNLNDTRYATKVFRDQLNNYSKHHSKDDENKLFKVVCMNGSITSFLRKSMWRKNEEQVYRFNFWKKDRDQFFHHAVDASIIAIFSLLTKTLYNKLRVYESYDVQRREDGVYLINKETGEVKKADKDYWKDQHNFLKIRENAIEIKNVLNNVDFQNQVRYSRKANTKLNTQLFNETLYGVKEFENNFYKLEKVNLFSRKDLRKFILEDLNEESEKNKKNENGSRKRILTEKYIVDEILQILENEEFKDSKSDINALNKYMDSLPSKFSEFFSQDFINKCKKENSLILTFDAIKHNDPKKVIKIKNLKFFREDATLKNKQAVHKDSKNQIKSFYESYKCVGFIWLKNKNDLEESIFVPINSRVIHFGDKDKDIFDFDSYNKEKLLNEINLKRPENKKFNSINEIEFVKFVKPGALLLNFENQQIYYISTLESSSLRAKIKLLNKMDKGKAVSMKKITNPDEYKIIEHVNPLGINLNWTKKLENNN

SEQ ID NO: 553 - protein, 1401 aa, Myroides injenensis
MKRILGLDLGTTSIGWAYVHEAENVNETSSIQKVGVRVNPLTTEEQTNFEKGKPITTNASRTLARSARRNLQRYKLRRDNLIQILKENNWINNTTSLTETGNHSTFETYELRNKAASEKLTLDQLSRVLLMLNKKRGYKSSRKVNSKEEGQLIDGMEVAKKLYHEQLTPGQLSLQLMNQGVKKLPDYYRSDLNQELESIWNFQQQFYPNILTDKFKEEINGKGLTSTSSAFWNIYNFNTAENKGSRDEKKKQALQWRSEALSKQLSKEIVAYIIADLNGQIYNSSGYLGAISDRSKELYFNNLTVGQYLFKQLKSNPHTSLKNQVFYRQDYLNEFEKIWETQSKFYPKELTAALKREIRDVIIFYQRKLKSQKGLISFCEFEQKQKTINGKTKTIGHRVIPKSSPLFQEFKIWQQLHNVVLRNKKTNEIVSLADEQKVHLFEELNLKGKLKSNQVLKLIENKPKDWELNYTELEGNNTNKALYNAYLDILDIEGYDVRNELKVKLNKDDIELSDLDVNASEIKEMIFSVFKHLGINTEILEFDATLEDKVFEKQASYQLWHLLYSYEEDNSPTGLDRLYNLLHKKFGFKLNHAKLIGNVLFQDDYGSLSSKAIKNIFPYITENNYYTACELAGYKHSKHSLTKEENETRELKNRLTILPKNSLRNPVVEKIINQMINVVNTLIDEENNILIAQGKEPNFQFDEIRIELARELKKNAKEREELTKSINKSKTDHEKIIKILQKEDGIKNPTRNDIVRFKLYSELKNNGYKDLYTNEYIERKDIFTKEYDIEHIIPQSKLFDDSFSNKTLVRRNVNLKKGNQTAYDFILCEYGQEKANEFETRITNLYNLGKDEGISKSKFKKLLMQESEIGNGFIERDLRETQYIAKKAKSLLLEITRNVISTSGSITDRLREDWGLINVMKELNLQKYRDAGLTEFVKMKDGNKKEVIIDWTKRNDHRHHAMDALTIAFTKHNHIQYLNHLNARKNVNNELHNNIIAIEKLETTLVSDERGNKKRIFKEPIANFRTIAKSHLEAILVSHKAKNKVVTKNINKISGKKISQQTLTPRGQLHKETIYGKIRQYVSKQEKVGPKFTIEVIEQVSNPTYRNLLLKRLEENNNDPKKAFGGKNSLNKNPIYINLEKNIKVPEVLKLVWLEDNYTIRKEISPDLKIDKVIDQGVKQILQNRLAQYKGDSKLAFSNLDANPIWLNEDKGIAIKRVTISGIATAQPLHRKKDHLGQPILDHNGQEIPVDFISTGNNHHVAIYEDENGKLQESVVSHFEAVERVNQKLPIIDKTFNQHLGWKFLFTMKQNELFLFPSDDFNPNEIDLFDKQNYTVISKHLFRIQKLSTKDYSFRHHLETNVEEIKDLKTITWRREGLNGIQNIIKVRTNHLGEIIHIGEY

SEQ ID NO: 554 - protein, 1466 aa, Myroides odoratus
MKNILGLDLGTNSIGWALVKEDFENKQGEILGLGSRIIPMSQDILGEFGRGNSISQTADRTGYRGVRRLRERHLLRRERLHRVLNILGFLPNHYAKEIDFTKRLGKFINHAEPKLSFDKEFIFKDSFNEMLKDFQQNQPGFIINKHGEEALVPYDWTIYYLRKKALTQKIDKEELAWILLNFNQKRGYYQLRGEEEEENTNKLVEFYSLKIIDVIADNEVNKKGEVWYSLHLENGWIYRRSSKISLVDWKDKVRDFIVTTDVNDDGSEKLDKDGVVKRSFRAPSADDWTLLKKKTEQDIDNSNKTVGAYIYENLLLNPKQKIKGKLVRTIERKFYKDELKQILEKQKEFHQELQNEQLLQDCVRELYKYNEQHQQMLESKDFVHLFLNDIIFYQRPLRSQKSLISNCTLEKRVSRDGVVFPIKVISKSNPYYQEFRLLQWLQNLAIYRKDDDVNVTQEFLNSIESWENLLQFLNAKKEIKQEQLIKFLLEQKGLKGNSLKTAILTYRWNYVTDKVYPMNETRSLIQDKLKKVENVATDFLSFDNEMALWHIIYSVNDKIEYEKALAKFASKHNLDEISFVESFKKFPPFKSDYGSFSEKAIKKLLPLMRFGSVWNKNNIVPSVLDRIDKILTGEYDEKIKIRVREKAEQFQLNQIEDFQNLPLWLAQYVVYDRHSEAEIAGKWNSVKDLENYLKEFKQHSLRNPIVEQIITETLRVVKDIWQQYGNGVQNFFDEIHIELGREMKNTADERKRITNSVTENENTNLRIKALLVELKEDTNIENVRPHSPMQQEILKIYEEGVLNAVENIDEDILKISKTAQPSKSELIRYKLWLEQKYQSPYTGEMIPLSRLFTSDYEIEHVIPQSRYFDDSLSNKVICEAAVNKRKDNQLGLEFIKNHHSEKIELGNGRTAQVLEVEAYESFVKKNYDKNRGKRNKLLLEDVPEKMIERQLNDTRYISKFVTHLLSNIVRKDEVNSKDDGINSKNIIPGNGKITSQLKQDWGLNDVWNELILPRFERMNNLTNSTDFTSTNTNGKIIPTVPLEYSKGFSKKRIDHRHHALDALVIALATRDHVNLLNNESALPKKDRTKEEQKSFRFDLQVNLRNKEKYFNVKEGREKEKFTTFKKPWNTLTQDTRDALENMVVSFKQNLRVINKATNYYESYTDENGNLRLDKYGNPKKELISQKGTNWAIRKSLHKETVSGQIHLDRVKVTKGKIVTATRKSLDSSFNEKSIESITDTGIQKILRNYLKAKDNKPDVAFSPEGIEELNKSISVYNEGKNHQPIIKVRIFEQGSKFPVGETGNKIAKFVEAAKGTNLFFGIYQDKTGKRSYDTIPLNLVIERLKQGLSPVPETNEKGHQLLFHLSPNDLVYVPTIDDNEQLDSNRVYKFTDSSDTTCNFIPSNISAIIFNINSKEQEKRGINYPIQNELGVGSPQSKNQKSFDGFMIKEVCIKLKVDRLGNISKT

SEQ ID NO: 555 - protein, 241 aa, Neisseria lactamica
MAAFKPNPMNYILGLDIGIASVGWAMVEIDKEENPIRLIDLGVRVFERAEMPKTGDSLAMARRLARSVRRLTRRRAHRLLRARRLLKREGVLQDADFDENGLVKSLPNTPWQLRAAALDRKLTCLEWSAVLLHLIKHRGYLSQRKNEGETADKELGALLKGVADNAHALQTGDFRTPAELALNKFEKESGHIRNQRGDYSHTFSRKDLQAELNLLFEKQKEFGNPHVSDGLKEGIETLLMA

SEQ ID NO: 556 - protein, 666 aa, Neisseria lactamica
MAAFKPNPMNYILGLDIGIASVGWAMVEVDEEENPIRLIDLGVRVFERAEVPKTGDSLAMARRLARSVRRLTRRRAHRLLRARRLLKREGVLQDADFDENGLVKSLPNTPWQLRAAALDRKLTCLEWSAVLLHLVKHRGYLSQRKNEGETADKELGALLKGVADNAHALQTGDFRTPAELALNKFEKESGHIRNQRGDYSHTFSRKDLQAELNLLFEKQKEFGNPHVSDGLKEDIETLLMAQRPALSGDAVQKMLGHCTFEPAEPKAAKNTYTAERFIWLTKLNNLRILEQGSERPLTDTERATLMDEPYRKSKLTYAQARKLLGLEDTAFFKGLRYGKDNAEASTLMEMKAYHAISRALEKEGLKDKKSPLNLSTELQDEIGTAFSLFKTDKDITGRLKDRVQPEILEALLKHISFDKFVQISLKALRRIVPLMEQGKRYDEACAEIYGDHYCKKNAEEKIYLPPIPADEIRNPVVLRALSQARKVINCVVRRYGSPARIHIETAREVGKSFKDRKEIEKRQEENRKDREKAAAKFREYFPNFVGEPKSKDILKLRLYEQQHGKCLYSGKEINLVRLNEKGYVEIDHALPFSRTWDDSFNNKVLVLGSENQNKGNQTPYEYFNGKDNSREWQEFKARVETSRFPRSKNNGFCCKNSMKKDLKNAT

SEQ ID NO: 557 - protein, 828 aa, Neisseria lactamica
MLGHCTFEPAEPKAAKNTYTAERFIWLTKLNNLRILEQGSERPLTDTERATLMDEPYRKSKLTYAQARKLLGLEDTAFFKGLRYGKDNAEASTLMEMKAYHAISRALEKEGLKDKKSPLNLSTELQDEIGTAFSLFKTDKDITGRLKDRVQPEILEALLKHISFDKFVQISLKALRRIVPLMEQGKRYDEACAEIYGDHYGKKNTEEKIYLPPIPADEIRNPVVLRALSQARKVINAVVRRYDSPARIHIETAREVGKSFKDRKEIEKRQEENRKDREKAAAKFREYFPNFVGEPKSKDILKLRLYEQQHGKCLYSGKEINLVRLNEKGYVEIDHALPFSRTWDDSFNNKVLVLGSENQNKGNQTPYEYFNGKDNSREWQEFKARVETSRFPRSKKQRILLQKFDEEGFKERNLNDTRYVNRFLCQFVADHILLTGKGKRRVFASNGQITNLLRGFWGLRKVRAENDRHHALDAVVVACSTVAMQQKITRFVRYKEMNAFDGKTIDKETGEVLHQKAHFPQPWEFFAQEVMIRVFGKPDGKPEFEEADTSEKLRTLLAEKLSSRPEAVHEYVTPLFVSRAPNRKMSGQGHMETVKSAKRLDEGISVLRVPLTQLKLKDLEKMVNREREPKLYDALKAQLETHKDDPAKAFAEPFYKYDKAGSRTQQVKAVRIEQVQKTGVWVRNHNGIADNATMVRVDVFEKGGKYYLVPIYSWQVAKGILPDRAVVAFKDEEDWTVMDDSFEFRFVLYANDLIKAELKKETFFGYFSGLDRSTGNISLRSHDLDKTKGKDGVYRIGIKTALSFQKHQIDELGKEIRPCRLKKRPPVR

SEQ ID NO: 558 - protein, 408 aa, Neisseria lactamica
MNDTRYVNRFLCQFVADHILLTGKGKRRVFASNGQITNLLRGFWGLRKVRTENDRHHALDAVVVACSTVAMQQKITRFVRYKEMNAFDGKTIDKETGEVLHQKAHFPQPWEFFAQEVMIRVFGKPDGKPEFEEADTPEKLRTLLAEKLSSRPEAVHEYVTPLFVSRAPNRKMSGQGHMETVKSAKRLDEGISVLRVPLTQLKLKGLEKMVNREREPKLYDALKAQLETHKDDPAKAFAEPFYKYDKAGSRTQQVKAVRIEQVQKTGVWVRNHNGIADNATMVRVDVFEKGGKYYLVPIYSWQVAKGILPDRAVVAFKDEEDWTVMDDSFEFRFVLYANDLIKLTAKKNEFLGYFVSLNRATGAIDIRTHDTDSTKGKNGIFQSVGVKTALSFQKTKSTNSAKKSDHAV

SEQ ID NO: 559 - protein, 1082 aa, Neisseria meningitidis
MAAFKPNPINYILGLDIGIASVGWAMVEIDEDENPICLIDLGVRVFERAEVPKTGDSLAAARRLARSVRRLTRRRAHRLLRARRLLKREGVLQAADFDENGLIKSLPNTPWQLRAAALDRKLTPLEWSAVLLHLIKHRGYLSQRKNEGETADKELGALLKGVADNAHALQTGDFRTPAELALNKFEKESGHIRNQRGDYSHTFSRKDLQAELILLFEKQKEFGNPHVSGGLKEGIETLLMTQRPALSGDAVQKMLGHCTFEPAEPKAAKNTYTAERFIWLTKLNNLRILEQGSERPLTDTERATLMDEPYRKSKLTYAQARKLLGLEDTAFFKGLRYGKDNAEASTLMEMKAYHAISRALEKEGLKDKKSPLNLSPELQDEIGTAFSLFKTDEDITGRLKDRVQPEILEALLKHISFDKFVQISLKALRRIVPLMEQGKRYDEACAEIYGDHYGKKNTEEKIYLPPIPADEIRNPVVLRALSQARKVINGVVRRYGSPARIHIETAREVGKSFKDRKEIEKRQEENRKDREKAAAKFREYFPNFVGEPKSKDILKLRLYEQQHGKCLYSGKEINLGRLNEKGYVEIDHALPFSRTWDDSFNNKVLVLGSENQNKGNQTPYEYFNGKDNSREWQEFKARVETSRFPRSKKQRILLQKFDEDGFKERNLNDTRYVNRFLCQFVADRMRLTGKGKKRVFASNGQITNLLRGFWGLRKVRAENDRHHALDAVVVACSTVAMQQKITRFVRYKEMNAFDGKTIDKETGEVLHQKTHFPQPWEFFAQEVMIRVFGKPDGKPEFEEADTPEKLRTLLAEKLSSRPEAVHEYVTPLFVSRAPNRKMSGQGHMETVKSAKRLDEGVSVLRVPLTQLKLKDLEKMVNREREPKLYEALKARLEAHKDDPAKAFAEPFYKYDKAGNRTQQVKAVRVEQVQKTGVWVRNHNGIADNATMVRVDVFEKGDKYYLVPIYSWQVAKGILPDRAVVQGKDEEDWQLIDDSFNFKFSLHPNDLVEVITKKARMFGYFASCHRGTGNINIRIHDLDHKIGKNGILEGIGVKTALSFQKYQIDELGKEIRPCRLKKRPPVR

SEQ ID NO: 560 - protein, 976 aa, Neisseria meningitidis
MAAFKPNPINYILGLDIGIASVGWAMVEIDEDENPICLIDLGVRVFERAEVPKTGDSLAAARRLARSVRRLTRRRAHRLLRARRLLKREGVLQAADFDENGLIKSLPNTPWQLRAAALDRKLTPLEWSAVLLHLIKHRGYLSQRKNEGETADKELGALLKGVADNAHALQTGDFRTPAELALNKFEKESGHIRNQRGDYSHTFSRKDLQAELILLFEKQKEFGNPHVSGGLKEGIETLLMTQRPALSGDAVQKMLGHCTFEPAEPKAAKNTYTAERFIWLTKLNNLRILEQGSERPLTDTERATLMDEPYRKSKLTYAQARKLLGLEDTAFFKGLRYGKDNAEASTLMEMKAYHAISRALEKEGLKDKKSPLNLSPELQDEIGTAFSLFKTDEDITGRLKDRIQPEILEALLKHISFDKFVQISLKALRRIVPLMEQGKRYDEACAEIYGDHYGKKNTEEKIYLPPIPADEIRNPVVLRALSQARKVINGVVRRYGSPARIHIETAREVGKSFKDRKEIEKRQEENRKDREKAAAKFREYFPNFVGEPKSKDILKLRLYEQQHGKCLYSGKEINLGRLNEKGYVEIDHALPFSRTWDDSFNNKVLVLGSENQNKGNQTPYEYFNGKDNSREWQEFKARVETSRFPRSKKQRILLQKFDEDGFKERNLNDTRYVNRFLCQFVADRMRLTGKGKKRVFASNGQITNLLRGFWGLRKVRAENDRHHALDAVVVACSTVAMQQKITRFVRYKEMNAFDGKTIDKETGEVLHQKTHFPQPWEFFAQEVMIRVFGKPDGKPEFEEADTPEKLRTLLAEKLSSRPEAVHEYVTPLFVSRAPNRKMSGQGHMETVKSAKRLDEGVSVLRVPLTQLKLKDLEKMVNREREPKLYEALKARLEAHKDDPAKAFAEPFYKYDKAGNRTQQVKAVRVEQVQKTGVWVRNHNGIADNATMVRVDVFEKGDKYYLVPIYSWQVAKGIFAG

SEQ ID NO: 561 - protein, 1081 aa, Neisseria meningitidis
MAAFKPNPINYILGLDIGIASVGWAMVEIDEDENPICLIDLGVRVFERAEVPKTGDSLAAARRLARSVRRLTRRRAHRLLRARRLLKREGVLQAADFDENGLIKSLPNTPWQLRSAALDRKLTPLEWSAVLLHLIKHRGYLSQRKNEGETADKELGALLKGVADNAHALQTGDFRTPAELALNKFEKESGHIRNRRGDYSHTFSRKDLQAELDLLFEKQKEFGNPHISDDLKEGIETLLMTQRPALSGDAVQKMLGHCTFEPTEPKAAKNTYTAERFVWLTKLNNLRILEQGSERPLTDTERATLMDEPYRKSKLTYAQARKLLELDDTAFFKGLRYGKDNAEASTLMEMKAYHAISRALEKEGLKDKKSPLNLSPELQDEIGTAFSLFKTDEDITGRLKDRVQPEILEVLLKHISFDKFVQISLKALRRIVPLMEQGKRYDEACAEIYGDHDGKKNTEEKIYLPPIPADEIRNPVVLRALSQARKVINAVVRRYGSPARIHIETAREVGKSFKDRKEIEKRQEENRKDREKAAAKFREYFPNFVGEPKSKDILKLRLYEQQHGKCLYSGKEINLGRLNEKGYVEIDHALPFSRTWDDSFNNKVLVLGSENQNKGNQTPYEYFNGKDNSREWQEFKARVETSRFPRSKKQRILLQKFDEEGFKERNLNDTRYVNRFLCQFVADHMLLTGKGKRRVFASNGQITNLLRGFWGLRKVRAENNRHHALDAVVVACSTVAMQQKITRFVRYKEMNAFDGKTIDKETGEVLHQKTHFPQPWEFFAQEVMIRVFGKPDGKPEFEEADTPEKLRTLLAEKLSSRPEAVHEYVTPLFVSRAPNRKMSGQGHMETVKSAKRLDEGVSVLRVPLTQLKLKDLEKMVNREREPKLYEALKARLEAHKDDPAKAFAEPFYKYDKAGNRTQQVKAVRVEQVQKTGVWVRNHNGIADNATMVRVDVFEKAGKYYLVPIYSWQVAKGILPDRAVVAYADEEGWTVIDESFRFKFVLYSNDLIKVQLKKDSFLGYFSGLDRATGAISLREHDLEKSKGKDGMHRIGVKTALSFQKYQIDEMGKEIRLCRLKKRPPVR

SEQ ID NO: 562 - protein, 1081 aa, Neisseria meningitidis
MAAFKPNPINYILGLDIGIASVGWAMVEIDEDENPICLIDLGVRVFERAEVPKTGDSLAAARRLARSVRRLTRRRAHRLLRARRLLKREGVLQAADFDENGLIKSLPNTPWQLRSAALDRKLTPLEWSAVLLHLIKHRGYLSQRKNEGETADKELGALLKGVANNAHALQTGDFRTPAELALNKFEKESGHIRNQRGDYSHTFSRKDLQAELILLFEKQKEFGNPHVSGGLKEGIETLLMTQRPALSGDAVQKMLGHCTFEPAEPKAAKNTYTAERFIWLTKLNNLRILEQGSERPLTDTERATLMDEPYRKSKLTYAQARKLLGLEDTAFFKGLRYGKDNAEASTLMEMKAYHAISRALEKEGLKDKKSPLNLSPELQDEIGTAFSLFKTDEDITGRLKDRIQPEILEALLKHISFDKFVQISLKALRRIVPLMEQGKRYDEACAEIYGDHYGKKNTEEKIYLPPIPADEIRNPVVLRALSQARKVINGVVRRYGSPARIHIETAREVGKSFKDRKEIEKRQEENRKDREKAAAKFREYFPNFVGEPKSKDILKLRLYEQQHGKCLYSGKEINLGRLNEKGYVEIDHALPFSRTWDDSFNNKVLVLGSENQNKGNQTPYEYFNGKDNSREWQEFKARVETSRFPRSKKQRILLQKFDEDGFKERNLNDTRYVNRFLCQFVADRMRLTGKGKKRVFASNGQITNLLRGFWGLRKVRAENDRHHALDAVVVACSTVAMQQKITRFVRYKEMNAFDGKTIDKETGEVLHQKTHFPQPWEFFAQEVMIRVFGKPDGKPEFEEADTPEKLRTLLAEKLSSRPEAVHEYVTPLFVSRAPNRKMSGQGHMETVKSAKRLDEGVSVLRVPLTQLKLKDLEKMVNREREPKLYEALKARLEAHKDDPAKAFAEPFYKYDKAGNRTQQVKAVRVEQVQKTGVWVRNHNGIADNATMVRVDVFEKAGKYYLVPIYSWQVAKGILPDRAVVAYADEEGWTVIDESFRFKFVLYSNDLIKVQLKKDSFLGYFSGLDRATGAISLREHDLEKSKGKDGMHRIGVKTALSFQKYQIDEMGKEIRLCRLKKRPPVR

SEQ ID NO: 563 - protein, 1082 aa, Neisseria meningitidis
MAAFKPNPINYILGLDIGIASVGWAMVEIDEDENPICLIDLGVRVFERAEVPKTGDSLAMARRLARSVRRLTRRRAHRLLRARRLLKREGVLQAADFDENGLIKSLPNTPWQLRAAALDRKLTPLEWSAVLLHLIKHRGYLSQRKNEGETADKELGALLKGVADNAHALQTGDFRTPAELALNKFEKESGHIRNQRGDYSHTFSRKDLQAELILLFEKQKEFGNPHVSGGLKEGIETLLMTQRPALSGDAVQKMLGHCTFEPAEPKAAKNTYTAERFIWLTKLNNLRILEQGSERPLTDTERATLMDEPYRKSKLTYAQARKLLGLEDTAFFKGLRYGKDNAEASTLMEMKAYHAISRALEKEGLKDKKSPLNLSPELQDEIGTAFSLFKTDEDITGRLKDRIQPEILEALLKHISFDKFVQISLKALRRIVPLMEQGKRYDEACAEIYGDHYGKKNTEEKIYLPPIPADEIRNPVVLRALSQARKVINGVVRRYGSPARIHIETAREVGKSFKDRKEIEKRQEENRKDREKAAAKFREYFPNFVGEPKSKDILKLRLYEQQHGKCLYSGKEINLGRLNEKGYVEIDHALPFSRTWDDSFNNKVLVLGSENQNKGNQTPYEYFNGKDNSREWQEFKARVETSRFPRSKKQRILLQKFDEDGFKERNLNDTRYVNRFLCQFVADRMRLTGKGKKRVFASNGQITNLLRGFWGLRKVRAENDRHHALDAVVVACSTVAMQQKITRFVRYKEMNAFDGKTIDKETGEVLHQKTHFPQPWEFFAQEVMIRVFGKPDGKPEFEEADTPEKLRTLLAEKLSSRPEAVHEYVTPLFVSRAPNRKMSGQGHMETVKSAKRLDEGVSVLRVPLTQLKLKDLEKMVNREREPKLYEALKARLEAHKDDPAKAFAEPFYKYDKAGNRTQQVKAVRVEQVQKTGVWVRNHNGIADNATMVRVDVFEKGDKYYLVPIYSWQVAKGILPDRAVVQGKDEEDWQLIDDSFNFKFSLHPNDLVEVITKKARMFGYFASCHRGTGNINIRIHDLDHKIGKNGILEGIGVKTALSFQKYQIDELGEEIRPCRLKKRPPVR

SEQ ID NO: 564 - protein, 1082 aa, Neisseria meningitidis
MAAFKPNPINYILGLDIGIASVGWAMVEIDEDENPICLIDLGVRVFERAEVPKTGDSLAMARRLARSVRRLTRRRAHRLLRARRLLKREGVLQAADFDENGLIKSLPNTPWQLRAAALDRKLTPLEWSAVLLHLIKHRGYLSQRKNEGETADKELGALLKGVADNAHALQTGDFRTPAELALNKFEKESGHIRNQRGDYSHTFSRKDLQAELILLFEKQKEFGNPHVSGGLKEGIETLLMTQRPALSSDAVQKMLGHCTFEPAEPKAAKNTYTAERFIWLTKLNNLRILEQGSERPLTDTERATLMDEPYRKSKLTYAQARKLLGLEDTAFFKGLRYGKDNAEASTLMEMKAYHAISRALEKEGLKDKKSPLNLSPELQDEIGTAFSLFKTDEDITGRLKDRIQPEILEALLKHISFDKFVQISLKALRRIVPLMEQGKRYDEACAEIYGDHYGKKNTEEKIYLPPIPADEIRNPVVLRALSQARKVINGVVRRYGSPARIHIETAREVGKSFKDRKEIEKRQEENRKDREKAAAKFREYFPNFVGEPKSKDILKLRLYEQQHGKCLYSGKEINLGRLNEKGYVEIDHALPFSRTWDDSFNNKVLVLGSENQNKGNQTPYEYFNGKDNSREWQEFKARVETSRFPRSKKQRILLQKFDEDGFKERNLNDTRYVNRFLCQFVADRMRLTGKGKKRVFASNGQITNLLRGFWGLRKVRAENDRHHALDAVVVACSTVAMQQKITRFVRYKEMNAFDGKTIDKETGEVLHQKTHFPQPWEFFAQEVMIRVFGKPDGKPEFEEADTPEKLRTLLAEKLSSRPEAVHEYVTPLFVSRAPNRKMSGQGHMETVKSAKRLDEGVSVLRVPLTQLKLKDLEKMVNREREPKLYEALKARLEAHKDDPAKAFAEPFYKYDKAGNRTQQVKAVRVEQVQKTGVWVRNHNGIADNATMVRVDVFEKGDKYYLVPIYSWQVAKGILPDRAVVQGKDEEDWQLIDDSFNFKFSLHPNDLVEVITKKARMFGYFASCHRGTGNINIRIHDLDHKIGKNGILEGIGVKTALSFQKYQIDELGKEIRPCRLKKRPPVR

SEQ ID NO: 565 - protein, 1082 aa, Neisseria meningitidis
MAAFKPNPINYILGLDIGIASVGWAMVEIDEDENPICLIDLGVRVFERAEVPKTGDSLAMARRLARSVRRLTRRRAHRLLRARRLLKREGVLQAADFDENGLIKSLPNTPWQLRAAALDRKLTPLEWSAVLLHLIKHRGYLSQRKNEGETADKELGALLKGVADNAHALQTGDFRTPAELALNKFEKESGHIRNQRGDYSHTFSRKDLQAELILLFEKQKEFGNPHVSGGLKEGIETLLMTQRPALSSDAVQKMLGHCTFEPAEPKAAKNTYTAERFIWLTKLNNLRILEQGSERPLTDTERATLMDEPYRKSKLTYAQARKLLGLEDTAFFKGLRYGKDNAEASTLMEMKAYHAISRALEKEGLKDKKSPLNLSPELQDEIGTAFSLFKTDEDITGRLKDRIQPEILEALLKHISFDKFVQISLKALRRIVPLMEQGKRYDEACAEIYGDHYGKKNTEEKIYLPPIPADEIRNPVVLRALSQARKVINGVVRRYGSPARIHIETAREVGKSFKDRKEIEKRQEENRKDREKAAAKFREYFPNFVGEPKSKDILKLRLYEQQHGKCLYSGKEINLGRLNEKGYVEIDHALPFSRTWDDSFNNKVLVLGSENQNKGNQTPYEYFNGKDNSREWQEFKARVETSRFPRSKKQRILLQKFDEDGFKERNLNDTRYVNRFLYQFVADRMRLTGKGKKRVFASNGQITNLLRGFWGLRKVRAENDRHHALDAVVVACSTVAMQQKITRFVRYKEMNAFDGKTIDKETGEVLHQKTHFPQPWEFFAQEVMIRVFGKPDGKPEFEEADTPEKLRTLLAEKLSSRPEAVHEYVTPLFVSRAPNRKMSGQGHMETVKSAKRLDEGVSVLRVPLTQLKLKDLEKMVNREREPKLYEALKARLEAHKDDPAKAFAEPFYKYDKAGNRTQQVKAVRVEQVQKTGVWVRNHNGIADNATMVRVDVFEKGDKYYLVPIYSWQVAKGILPDRAVVQGKDEEDWQLIDDSFNFKFSLHPNDLVEVITKKARMFGYFASCHRGTGNINIRIHDLDHKIGKNGILEGIGVKTALSFQKYQIDELGKEIRPCRLKKRPPVR

SEQ ID NO: 566 - protein, 1081 aa, Neisseria meningitidis
MAAFKPNPINYILGLDIGIASVGWAMVEIDEDENPICLIDLGVRVFERAEVPKTGDSLAMARRLARSVRRLTRRRAHRLLRARRLLKREGVLQAADFDENGLIKSLPNTPWQLRAAALDRKLTPLEWSAVLLHLIKHRGYLSQRKNEGETADKELGALLKGVADNAHALQTGDFRTPAKLALNKFEKESGHIRNQRGDYSHTFSRKDLQAELNLLFEKQKEFGNPHISDGLKEGIETLLMTQRPALSGDAVQKMLGHCTFEPTEPKAAKNTYTAERFVWLTKLNNLRILEQGSEQPLTDTQRAKLMDEPYRKSKLTYAQARKLLGLEDTAFFKGLRYGKDNAEASTLMEMKAYHAISRALEKEGLKDKKSPLNLSPELQDEIGTAFSLFKTDEDITGRLKDRVQPEILEALLKHISFDKFVQISLKALRRIVPLMEQGKRYNEACAEIYGDHYGKKNTEEKIYLPPIPADEIRNPVVLRALSQARKVINGVVRRYGSPARIHIETAREVGKSFKDRKEIEKRQEENRKDREKAAAKFQEYFPNFVGEPKSKDILKLRLYEQQHGKCLYSGKEINLGRLNEKGYVEIDHALPFSRTWDDSFNNKVLVLGSENQNKGNQTPYEYFNGKDNSREWQEFKARVETSRFPRSKKQRILLQKFDEDGFKERNLNDTRYVNRFLCQFVADRMRLTGKGKKRVFASNGQITNLLRGFWGLRKVRAENDRHHALDAVVVACSTVAMQQKITRFVRYKEMNAFDGKTIDKETGEVLHQKTHFPQPWEFFAQEVMIRVFGKPDGKPEFEEADTPEKLRTLLAEKLSSRPEAVHEYVTPLFVSRAPNRKMSGQGHMETVKSAKRLDEGVSVLRVPLTQLKLKDLEKMVNREREPKLYEALKARLEAHKDDPAKAFAEPFYKYDKAGNRTQQVKAVRVEQVQKTGVWVRNHNGIADNATMVRVDVFEKGDKYYLVPIYSWQVAKGILPDRAVVAYADEEDWTVIDESFRFKFVLYSNDLIKVQLKKDSFLGYFSGLDRATGAISLREHDLEKSKGKDGMHRIGVKTALSFQKYQIDEMGKEIRPCRLKKRPPVR

SEQ ID NO: 567 - protein, 1081 aa, Neisseria meningitidis
MAAFKPNPINYILGLDIGIASVGWAMVEIDEEENPIRLIDLGVRVFERAEVPKTGDSLAMARRLARSVRRLTRRRAHRLLRARRLLKREGVLQAADFDENGLIKSLPNTPWQLRAAALDRKLTPLEWSAVLLHLIKHRGYLSQRKNEGETADKELGALLKGVADNAHALQTGDFRTPAELALNKFEKECGHIRNQRGDYSHTFSRKDLQAELNLLFEKQKEFGNPHVSGGLKEGIETLLMTQRPALSGDAVQKMLGHCTFEPAEPKAAKNTYTAERFIWLTKLNNLRILEQGSERPLTDTERATLMDEPYRKSKLTYAQARKLLSLEDTAFFKGLRYGKDNAEASTLMEMKAYHTISRALEKEGLKDKKSPLNLSPELQDEIGTAFSLFKTDEDITGRLKDRIQPEILEALLKHISFDKFVQISLKALRRIVPLMEQGKRYDEACAEIYGDHYGKKNTEEKIYLPPIPADEIRNPVVLRALSQARKVINGVVRRYGSPARIHIETAREVGKSFKDRKEIEKRQEENRKDREKAAAKFREYFPNFVGEPKSKDILKLRLYEQQHGKCLYSGKEINLGRLNEKGYVEIDHALPFSRTWDDSFNNKVLVLGSENQNKGNQTPYEYFNGKDNSREWQEFKARVETSRFPRSKKQRILLQKFDEDGFKERNLNDTRYVNRFLCQFVADRMRLTGKGKKRVFASNGQITNLLRGFWGLRKVRAENDRHHALDAVVVACSTVAMQQKITRFVRYKEMNAFDGKTIDKETGEVLHQKTHFPQPWEFFAQEVMIRVFGKPDGKPEFEEADTPEKLRTLLAEKLSSRPEAVHEYVTPLFVSRAPNRKMSGQGHMETVKSAKRLDEGVSVLRVPLTQLKLKDLEKMVNREREPKLYEALKARLEAHKDDPAKAFAEPFYKYDKAGNRTQQVKAVRVEQVQKTGVWVRNHNGIADNATMVRVDVFEKGDKYYLVPIYSWQVAKGILPDRAVVAYADEEDWTVIDESFRFKFVLYSNDLIKVQLKKDSFLGYFSGLDRATGAISLREHDLEKSKGKDGMHRIGVKTALSFQKYQIDEMGKEIRPCRLKKRPPVR

SEQ ID NO: 568 - protein, 1082 aa, Neisseria meningitidis
MAAFKPNPINYILGLDIGIASVGWAMVEIDEEENPIRLIDLGVRVFERAEVPKTGDSLAMARRLARSVRRLTRRRAHRLLRARRLLKREGVLQAADFDENGLIKSLPNTPWQLRAAALDRKLTPLEWSAVLLHLIKHRGYLSQRKNEGETADKELGALLKGVADNAHALQTGDFRTPAELALNKFEKECGHIRNQRGDYSHTFSRKDLQAELNLLFEKQKEFGNPHVSGGLKEGIETLLMTQRPALSGDAVQKMLGHCTFEPAEPKAAKNTYTAERFIWLTKLNNLRILEQGSERPLTDTERATLMDEPYRKSKLTYAQARKLLGLEDTAFFKGLRYGKDNAEASTLMEMKAYHAISRALEKEGLKDKKSPLNLSPELQDEIGTAFSLFKTDEDITGRLKDRIQPEILEALLKHISFDKFVQISLKALRRIVPLMEQGKRYDEACAEIYGDHYGKKNTEEKIYLPPIPADEIRNPVVLRALSQARKVINGVVRRYGSPARIHIETAREVGKSFKDRKEIEKRQEENRKDREKAAAKFREYFPNFVGEPKSKDILKLRLYEQQHGKCLYSGKEINLVRLNEKGYVEIDHALPFSRTWDDSFNNKVLVLGSENQNKGNQTPYEYFNGKDNSREWQEFKARVETSRFPRSKKQRILLQKFDEEGFKERNLNDTRYVNRFLCQFVADHILLTGKGKRRVFASNGQITNLLRGFWGLRKVRAENDRHHALDAVVVACSTVAMQQKITRFVRYKEMNAFDGKTIDKETGEVLHQKTHFPQPWEFFAQEVMIRVFGKPDGKPEFEEADTPEKLRTLLAEKLSSRPEAVHEYVTPLFVSRAPNRKMSGQGHMETVKSAKRLDEGVSVLRVPLTQLKLKDLEKMVNREREPKLYEALKARLEAHKDDPAKAFAEPFYKYDKAGNRTQQVKAVRVEQVQKTGVWVRNHNGIADNATMVRVDVFEKGGKYYLVPIYSWQVAKGILPDRAVVQGKDEEDWQLIDDSFNFKFSLHPNDLVEVITKKARMFGYFASCHRGTGNINIRIHDLDHKIGKNGILEGIGVKTALSFQKYQIDELGKEIRPCRLKKRPPVR

SEQ ID NO: 569 - protein, 1081 aa, Neisseria meningitidis
MAAFKPNPINYILGLDIGIASVGWAMVEIDEEENPIRLIDLGVRVFERAEVPKTGDSLAMARRLARSVRRLTRRRAHRLLRARRLLKREGVLQAADFDENGLIKSLPNTPWQLRAAALDRKLTPLEWSAVLLHLIKHRGYLSQRKNEGETADKELGALLKGVADNAHALQTGDFRTPAELALNKFEKESGHIRNQRGDYSHTFSRKDLQAELILLFEKQKEFGNPHVSGGLKEGIETLLMTQRPALSGDAVQKMLGHCTFEPAEPKAAKNTYTAERFIWLTKLNNLRILEQGSERPLTDTERATLMDEPYRKSKLTYAQARKLLGLEDTAFFKGLRYGKDNAEASTLMEMKAYHAISRALEKEGLKDKKSPLNLSPELQDEIGTAFSLFKTDEDITGRLKDRVQPEILEALLKHISFDKFVQISLKALRRIVPLMEQGKRYDEACAEIYGDHYGKKNTEEEIYLPPITADEIRNPVVLRALSQARKVINAVVRRYGSPARIHIETAREVGKSFKDRKEIEKRQEENRKDREKAAAKFREYFPNFVGEPKSKDILKLRLYEQQHGKCLYSGKEINLVRLNEKGYVEIDHALPFSRTWDDSFNNKVLVLGSENQNKGNQTPYEYFNGKENSREWQEFKARVETSRFPRSKKQRILLQKFDEDGFKERNLNDTRYVNRFLCQFVADRMRLTGKGKKRVFASNGQITNLLRGFWGLHKVRAENDRHHALDAVVVACSTIAMQQKITRFVRYKEMNAFDGKTIDKETGEVLHQKAHFPQPWEFFAQEVMIRVFGKPDGKPEFEEADTPEKLRTLLAEKLSSRPEAVHEYVTPLFVSRAPNRKMSGQGHMETVKSAKRLDEGISVLRVPLTQLKLKDLEKMVNRAREPKLYEALKARLEAHKDDPAKAFAEPFYKYDKAGNRTQQVKAVRVEQVQKTGVWVRNHNGIADNATMVRVDVFEKAGKYYLVPIYSWQVAKGILPDRAVVAYADEEDWTVIDESFRFKFVLYSNDLIKVQLKKDSFLGYFSGLDRATGAISLREHDLEKSKGKDGMHRIGVKTALSFQKYQIDEMGKEIRPCRLKKRPPVR

SEQ ID NO: 570 - protein, 1082 aa, Neisseria meningitidis
MAAFKPNPINYILGLDIGIASVGWAMVEIDEEENPIRLIDLGVRVFERAEVPKTGDSLAMARRLARSVRRLTRRRAHRLLRARRLLKREGVLQAADFDENGLIKSLPNTPWQLRAAALDRKLTPLEWSAVLLHLIKHRGYLSQRKNEGETADKELGALLKGVANNAHALQTGDFRTPAELALNKFEKESGHIRNQRGDYSHTFSRKDLQAELILLFEKQKEFGNPHVSGGLKEGIETLLMTQRPALSGDAVQKMLGHCTFEPAEPKAAKNTYTAERFIWLTKLNNLRILEQGSERPLTDTERATLMDEPYRKSKLTYAQARKLLGLEDTAFFKGLRYGKDNAEASTLMEMKAYHAISRALEKEGLKDKKSPLNLSSELQDEIGTAFSLFKTDEDITGRLKDRVQPEILEALLKHISFDKFVQISLKALRRIVPLMEQGKRYDEACAEIYGDHYGKKNTEEKIYLPPIPADKIRNPVVLRALSQARKVINGVVRRYGSPARIHIETAREVGKSFKDRKEIEKRQEENRKDREKAAAKFREYFPNFVGEPKSKDILKLRLYEQQHGKCLYSGKEINLVRLNEKGYVEIDHALPFSRTWDDSFNNKVLVLGSENQNKGNQTPYEYFNGKDNSREWQEFKARVETSRFPRSKKQRILLQKFDEDGFKECNLNDTRYVNRFLCQFVADHILLTGKGKRRVFASNGQITNLLRGFWGLRKVRAENDRHHALDAVVVACSTVAMQQKITRFVRYKEMNAFDGKTIDKETGKVLHQKTHFPQPWEFFAQEVMIRVFGKPDGKPEFEEADTPEKLRTLLAEKLSSRPEAVHEYVTPLFVSRAPNRKMSGAHKDTLRSAKRFVKHNEKISVKRVWLTEIKLADLENMVNYKNGREIELYEALKARLEAYGGNAKQAFDPKDNPFYKKGGQLVKAVRVEKTQESGVLLNKKNAYTIADNGDMVRVDVFCKVDKKGKNQYFIVPIYAWQVAENILPDIDCKGYRIDDSYTFCFSLHKYDLIAFQKDEKSKVEFAYYINCDSSNGRFYLAWHDKGSKEQQFRISTQNLVLIQKYQVNELGKEIRPCRLKKRPPVR

SEQ ID NO: 571 - protein, 1082 aa, Neisseria meningitidis
MAAFKPNPINYILGLDIGIASVGWAMVEIDEEENPIRLIDLGVRVFERAEVPKTGDSLAMARRLARSVRRLTRRRAHRLLRARRLLKREGVLQAADFDENGLIKSLPNTPWQLRAAALDRKLTPLEWSAVLLHLIKHRGYLSQRKNEGETADKELGALLKGVANNAHALQTGDFRTPAELALNKFEKESGHIRNQRGDYSHTFSRKDLQAELILLFEKQKEFGNPHVSGGLKEGIETLLMTQRPALSGDAVQKMLGHCTFEPAEPKAAKNTYTAERFIWLTKLNNLRILEQGSERPLTDTERATLMDEPYRKSKLTYAQARKLLGLEDTAFFKGLRYGKDNAEASTLMEMKAYHAISRALEKEGLKDKKSPLNLSSELQDEIGTAFSLFKTDEDITGRLKDRVQPEILEALLKHISFDKFVQISLKALRRIVPLMEQGKRYDEACAEIYGDHYGKKNTEEKIYLPPIPADEIRNPVVLRALSQARKVINGVVRRYGSPARIHIETAREVGKSFKDRKEIEKRQEENRKDREKAAAKFREYFPNFVGEPKSKDILKLRLYEQQHGKCLYSGKEINLVRLNEKGYVEIDHALPFSRTWDDSFNNKVLVLGSENQNKGNQTPYEYFNGKDNSREWQEFKARVETSRFPRSKKQRILLQKFDEDGFKECNLNDTRYVNRFLCQFVADHILLTGKGKRRVFASNGQITNLLRGFWGLRKVRAENDRHHALDAVVVACSTVAMQQKITRFVRYKEMNAFDGKTIDKETGKVLHQKTHFPQPWEFFAQEVMIRVFGKPDGKPEFEEADTPEKLRTLLAEKLSSRPEAVHEYVTPLFVSRAPNRKMSGAHKDTLRSAKRFVKHNEKISVKRVWLTEIKLADLENMVNYKNGREIELYEALKARLEAYGGNAKQAFDPKDNPFYKKGGQLVKAVRVEKTQESGVLLNKKNAYTIADNGDMVRVDVFCKVDKKGKNQYFIVPIYAWQVAENILPDIDCKGYRIDDSYTFCFSLHKYDLIAFQKDEKSKVEFAYYINCDSSNGRFYLAWHDKGSKEQQFRISTQNLVLIQKYQVNELGKEIRPCRLKKRPPVR

SEQ ID NO: 572 - protein, 1082 aa, Neisseria meningitidis
MAAFKPNPINYILGLDIGIASVGWAMVEIDEEENPIRLIDLGVRVFERAEVPKTGDSLAMARRLARSVRRLTRRRAHRLLRTRRLLKREGVLQAANFDENGLIKSLPNTLWQLRAAALDRKLTPLEWSAVLLHLIKHRGYLSQRKNEGETADKELGALLKGVAGNAHALQTGDFRTPAELALNKFEKESGHIRNQRGDYSHTFSRKDLQAELNLLFEKQKEFGNPHISDGLKEGIETLLMTQRPALSGDAVQKMLGHCTFEPTEPKAAKNTYTTERFIWLTKLNNLRILEQGSERPLTDTERATLMDEPYRKSKLTYAQARKLLELDDIAFFKGLRYGKDNAEASTLMEMKAYHAISRALEKEGLKDKKSPLNLSPELQDEIGTAFSLFKTDEDITGRLKDRIQPEILEALLKHINFDKFVQISLKALRRIVPLMEQGKRYDEACAEIYGDHYGKKNTEEKIDLPPIPADEIHNPVVLRALSQARKVINGVVRRYGSPARIHIETAREVGKSFKDRKEIEKRQEENRKDREKAAAKFREYFPNFVGEPKSKDILKLRLYEQQHGKCLYSGKEINLGRLNEKGYVEIDHALPFSRTWDDSFNNKVLVLGSENQNKGNQTPYEYFNGKDNSREWQEFKARVETSRFPRSKKQRILLQKFDEDGFKERNLNDTRYVNRFLCQFVADRMRLTGKGKKRVFASNGQITNLLRGFWGLRKVRAENDRHHALDAVVVACSTVAMQQKITRFVRYKEMNAFDGKTIDKETGEVLHQKTHFPQPWEFFAQEVMIRVFGKPDGKPEFEEADTPEKLRTLLTEKLSSRPEAVHEYVTPLFVSRAPNRKMSGQGHMETVKSAKRLDEGISVLRVPLTQLKLKDLEKMVNREREPKLYEALKARLEAHKDDPAKAFAEPFYKYDKAGNRTQQVKAMRVEQVQKTGVWVRNHNGIADNATMVRVDVFEKGDKYYLVPIYSWQVAKGILPDRAVVQGKDEEDWQLIDDSFNFKFSLHPNDLVEVITKKARMFGYFASCHRGTGNINIRIHDLDHKIGKNGILEGIGVKTALSFQKYQIDELGKEIRPCRLKKRPPVR

SEQ ID NO: 573 - protein, 1082 aa, Neisseria meningitidis
MAAFKPNPINYILGLDIGIASVGWAMVEIDEEENPIRLIDLSVRVFERAEVPKTGDSLAMARRLARSVRRLTRRRAHRLLRARRLLKREGVLQAADFDENGLIKSLPNTPWQLRAAALDRKLTPLEWSAVLLHLIKHRGYLSQRKNEGETADKELGALLKGVADNAHALQTGDFRTPAELALNKFEKESGHIRNQRGDYSHTFSRKDLQAELILLFEKQKEFGNPHVSGGLKEGIETLLMTQRPALSGDAVQKMLGHCTFEPAEPKAAKNTYTAERFVWLTKLNNLRILEQGSERPLTDTERATLMDEPYRKSKLTYAQARKLLGLEDTAFFKGLRYGKDNAEASTLMEMKAYHAISRALEKEGLKDKKSPLRLSPELQDEIGTAFSLFKTDEDITGRLKDRVQPEILEALLKHISFDKFVQISLKALRRIVPLMEQGKRYDEACAEIYGDHYGKKNAEEKIYLPPIPADEIRNPVVLRALSQARKVINGVVRRYGSPARIHIETAREVGKSFKDRKEIEKRQEENRKDREKAAAKFREYFPNFVGEPKSKDILKLRLYEQQHGKCLYSGKEINLGRLNEKGYVEIDHALPFSRTWDDSFNNKVLVLGSENQNKGNQTPYEYFNGKDNSREWQEFKARVETSRFPRSKKQRILLQKFDEDGFKERNLNDTRYVNRFLCQFVADRMRLTGKGKKRVFASNGQITNLLRGFWGLRKVRAENDRHHALDAVVVACSTVAMQQKITRFVRYKEMNAFDGKTIDKETGEVLHQKTHFPQPWEFFAQEVMIRVFGKPDGKPEFEEADTPEKLRTLLAEKLSSRPEAVHEYVTPLFVSRAPNRKMSGQGHMETVKSAKRLDEGVSVLRVPLTQLKLKDLEKMVNREREPKLYEALKARLEAHKDDPAKAFAEPFYKYDKAGNRTQQVKAVRVEQVQKTGVWVRNHNGIADNATMVRVDVFEKGDKYYLVPIYSWQVAKGILPDRAVVQGKDEEDWQLIDDSFNFKFSLHPNDLVEVITKKARMFGYFASCHRGTGNINIRIHDLDHKIGKNGILEGIGVKTALSFQKYQIDELGKEIRPCRLKKRPPVR

SEQ ID NO: 574 - protein, 1082 aa, Neisseria meningitidis
MAAFKPNSINYILGLDIGIASVGWAMVEIDEEENPIRLIDLGVRVFERAEVPKTGDSLAMARRLARSVRRLTRRRAHRLLRTRRLLKREGVLQAANFDENGLIKSLPNTPWQLRAAALDRKLTPLEWSAVLLHLIKHRGYLSQRKNEGETADKELGALLKGVAGNAHALQTGDFRTPAELALNKFEKESGHIRNQRSDYSHTFSRKDLQAELILLFEKQKEFGNPHVSGGLKEGIETLLMTQRPALSGDAVQKMLGHCTFEPAEPKAAKNTYTAERFIWLTKLNNLRILEQGSERPLTDTERATLMDEPYRKSKLTYAQARKLLGLEDTAFFKGLRYGKDNAEASTLMEMKAYHAISRALEKEGLKDKKSPLNLSPELQDEIGTAFSLFKTDEDITGRLKDRIQPEILEALLKHISFDKFVQISLKALRRIVPLMEQGKRYDEACAEIYGDHYGKKNTEEKIYLPPIPADEIRNPVVLRALSQARKVINGVVRRYGSPARIHIETAREVGKSFKDRKEIEKRQEENRKDREKAAAKFREYFPNFVGEPKSKDILKLRLYEQQHGKCLYSGKEINLGRLNEKGYVEIDHALPFSRTWDDSFNNKVLVLGSENQNKGNQTPYEYFNGKDNSREWQEFKARVETSRFPRSKKQRILLQKFDEDGFKERNLNDTRYVNRFLCQFVADRMRLTGKGKKRVFASNGQITNLLRGFWGLRKVRAENDRHHALDAVVVACSTVAMQQKITRFVRYKEMNAFDGKTIDKETGEVLHQKTHFPQPWEFFAQEVMIRVFGKPDGKPEFEEADTLEKLRTLLAEKLSSRPEAVHEYVTPLFVSRAPNRKMSGQGHMETVKSAKRLDEGVSVLRVPLTQLKLKDLEKMVNREREPKLYEALKARLEAHKDDPAKAFAEPFYKYDKAGNRTQQVKAVRVEQVQKTGVWVRNHNGIADNATMVRVDVFEKGDKYYLVPIYSWQVAKGILPDRAVVQGKDEEDWQLIDDSFNFKFSLHPNDLVEVITKKARMFGYFASCHRGTGNINIRIHDLDHKIGKNGILEGIGVKTALSFQKYQIDELGKEIRPCRLKKRPPVR

SEQ ID NO: 575 - protein, 67 aa, Neisseria meningitidis
MFGYFASCHRGTGNINIRIHDLDHKIGKNGILEGIGVKTALSFQKYQIDELGKEIRPCRLKKRPPVR

SEQ ID NO: 576 - protein, 220 aa, Neisseria mucosa
MRHIFSDGLKEGIETLLMTQRPALSGDAVQKMLGHCTFEPTEPKAAKNTYTAERFIWLTKLNNLRILEQGSERPLTNTERATLMDEPYRKSKLTYAQARKLLGLKDTAFFKGLRYGKDNAEASTLMEMKAYHAISRALEKEGLKDKKSPLNLSPELQDEIGTAFSLFKTDEDITGRLKTELTPASNKTLSRPFTVKSASNGSTSAPWLPSTKWFLHFKPA

SEQ ID NO: 577 - protein, 392 aa, Neisseria sp.
MAPFTLKPLNYILGLDIGIASVGWAVVETDSDVLPYRLIDVGVRTFDRAEVPKTGESPAAARRLARSVRRMIRRRAHRMLRARRLLKREGMLQAADFDAHGLVENLPVNPWQLRVDALSRKLMPLEWAAVLLHMVKHRGYLSQRKNERNSSDKELGALLSGVAANSEALQGGDFRTPAELAVNKFEKESGHIRNQRGDYSHTFNRKDVQAELVLLFEKQKEYGNPYISDGLLTGVEDLLMTQRAALSGDAVQKMLGRCTFEPEEYKAAKNTYSAERFVWLTKLNNLRILDQGSERPLTDSERAKLMDEPYKKTKLTYAQVRRLLELDDTAFFKGLRYSKDNAESATLMEMKAYHSISGALEKAGLKNKKIAAGLIARIAGRNRRGVFAIQNR

SEQ ID NO: 578 - protein, 701 aa, Neisseria sp.
MQDEIGEAFSLFKTDEDIRGRLKGKLPDEQLDALLEYVSFDKFVQLSLKALRKILPLMEQGKRYDEACAEIYGDHYGIKDDKQAQFLPPVSADEIRNPVVLRALSQARKVVNAVVRRYGSPARVHIETAREVGKSFLDRKKIEKRQEENRKDRERSIAKFREYFPNFVGEPKAKDILKMRLYEQQQGQCLYSGKAIDLRRLNEKGYVEIDHALPFSRTWDDSFNNKVLVLAGENQNKRNQTPFEWLGGDEKRWREFTARVEHCRFPRSKKQRILMQKLDEKDFKERNLNDTRYVNRFLCNFIAQNMLLTGEDKNRVFASNGQITNLLRGMWGLKKVRESNDRHHALDAVVVACSTVAMQQKITNYVRQKEMNVFDGEMVDKTTGEVSRLHFPQPWDFFRQEVMMRVFGKPDTPSENNEEADTPEKLRALLADKLSSRPEAVHEAVTPLFVSRAPSRKMSGQGHMETIKSAKRLSEGKSVLRVPLTQLTPKLLENMVNREREPQLYEDLLGRLNAHGGDPAKAFAAPFFKRDKAGNPTQQVKAVRVEDVQKSGVIVREGNGVADNATMVRVDVFEKGGKYYLMPIYTWQAAKGILPNKAVIAHTDEANWQEMDTSFTFKFALYPNDLVLASLKKETYFGYFAGLDRSTGNISLRVHDLEKSKGKDGVYRIGVKTALSFQKYQVDELGKTIRPCRLKKRPPVR

SEQ ID NO: 579 - protein, 1089 aa, Neisseria sp.
MTAFKPNPLNYILGLDIGIASVGWAMVEIDDKENPVRLIDLGVRVFERAEMPKTGDSLAAARRLARSVRRLTRRRAHRLLRARRLLKHEGVLKPEDFDENGLVKPLPYIPKQPRNTPWQLRAAALDRKLTPLEWAAVLLHLVKHRGYLSQRKNEGETDDKELGALLKGVADNTHALQAGNFRTPAELALNKFEKESGHIRNQRGDYSHTFSRKDLQAELVLLFEKQKEFGNPYVSDDLKNGIENLLMTQRPALSGDAIQKMLGHCTFEPAEPKAAKNTYTAERFIWLTKLNNLRILNQGNERPLTDAERTTLMDEPYKKSKLTYAQARKLLDLDDTAFFKGLRYGKDNAESATLMEMKAYHAISRALEKEGLKDKKSPLSLSPELQDEIGTAFSLFKTDEEITGRLKGCLQPEILDALLKHISFDKFVQISLKALRRIVPLMEQGKRYDEACAEIYGDHHGRRNSEETLYLPPIPADEIRNPVVLRALSQARKVINGVGRRYGSPARIHIETAREVGKSFKDRKEIEKRQEENRKDREKAAAEFQEYFPNFVGEPKSKDILKLRLYRQQNCKCLYSGKEINLGRLNEKGYVEIDHALPFSRTWDDSFNNKVLVLGSENQNKGNRTPYEYLNGKDNSREWQEFKARVETSRFPHSKKQRILLQKFDEEGFKERNLNDTRYVNRFLCKFVADHMQLTGKGKRRVFASNGQITNLLRGFWGLRKVRAENDRHHALDAVVVACSTVAMQQRITRFVRYKEMNAFDGKTVDKETGEVLHQKTHFPQPWEFFAQEVMIRVFGKPDGKPELEEADTPEKLRALLAEKLSSRPEAVHEYVAPLFVSRAPNRKMSGQGHMETIKSPKRLDEGISVVRVPLTQLKLKDLEKMVNREREPKLYEALKARLEAHKDDPAKAFAEPFYKQDKAGNRTQQVKAVRIEQVQKTGVWVRNQNGIADNATMVRVDVFEKGGKYYLVPIYSWQVAKGILPDKAIIAFKDEEEWQLIDDSFNFKFPLHPNDLVEVITKKARIFGYFASCHRGTGNINIRIHDLDNKVGKNGILEGIGVKTALSFQKYQIDELGKEIRPCRLKKRPPVR

SEQ ID NO: 580 - protein, 1097 aa, Neisseria wadsworthii
MKKQPQRYILGLDLGIASVGWALILVDGAENPVGLLDCGVRTFERAEVPKTGDSLALARRQARSVRRLIRRRAHRLLRLRRLLKREGILSAADFNSDGLPNLPIDAWQLRVAGLERKLTNQEWAAVLLHLVKHRGYLSQRKSETQTENKELGRLLAGVAENSKLLSESSEQYRTPAELAVKLFAEQSGHLRNKGGEYTHTFNRLDLQKELHLLFERQYALGNPFASAELQSKVDELLMTQRSALQGEAVLKMLGKCTFEPSEYKAAKNTYSAERFIWLTKLNNLRILYNGEERALDEGDRKKLLDEPYKKAKLTYKQVRSILNLPESAVFKGLRYGKDSDGLKAENGTLMEMKAYHKIRTILDKAGLKGEWENRIRNPEILDKIGTAFSLYKTDEDIQAALADLRLPENVLDALLAGLNFDKFIQLSLKALRNILPLMERGIRYDEACKEVYGDHRALAESKNQVLLPPIPADEIRNPVVLRTLTQARKVINAIIRRYGSPQRVHIETARELGKSKQERDKIDRKNKENQNDRNRLASDIRKHFNFEPTPKDILKLRLYEQQHGKCLYSDLREEKGECLYTGNVIELHRLFEDGYVEIDHALPLSRTWDNSLNNKVLVLKSSNQNKGNKTPYEWLDGANNSRRWREFQARVQGCHFPYVKKQRIQTAKLDSKAEQGFLERNLNDTRYISKFMCQFITANLRLAETSNALMEEVAGENPYWKERKRQRVFAPSGSIIALLRGLWGLKKVREDNDRHHALDAIVVACSTVSMQQKITKAMQRRETLETVDSETGEVKTRIPQPWDFFRQEVMIRVFSDSPREELAEKLNSRPEALHDFVSPLFVSRAPNRKMTGQGHLETVKSAKRLSENISVVRKPLTALKLKDIENIVGYPDREPALYQALRERLLAHKDDPVKAFADKPFYKPAKDGGQGSLVKAVRIIENTKHGLKIRNGITDTNGDMVRTDVYQKTDKKGKRQYFIVPVYAWQVEKNELPTVDCKGYEIDDNYEFCFSLYKYDLIEIQNPNDINQELRAYYINCDSSDGRFWLAYHDKSAKEQQFRISTQNQPIIKKYQVDTLGKEIRLCKAEKRTALNGKKKK

SEQ ID NO: 581 - protein, 1426 aa, Niabella soli
MPRKNILGLDLGTTSIGFAKIIEDDDYQCSSVELIGVRVNPLTTDEQTNFEKGKPVSVNADRTLKRGMRRNLDRYQLRRDYLIEILRTHHIITADTKLAEDGKNTTHTTYALRALAATAEIPLEAFVRVLLAINKKRGYKSSRKAKNEDEGQLIDGMAIARRLYEESLTPGQFSYQLLKEGKKYLPDFYRSDLNTELNKVWNFQKQFYPEILTDEFKRHLEGKGQRATAVAFWGQHGFSMAENKGSREEKKLHAYKWRSEAAHKQLTKEEVAFVITEINNDLNKSSGYLGAISDRSKELFFNKQTVGQYLHQQLKENPHTRLKGQVFYRQDYLDEFETIWEMQAKFYSALTLELKEEVRDVVIFYQRKLKSQMGLISLCEFESKEIEIEKNGEKAKKRIGLRVAPKSSPLFQEFKIWQVLNNLEFRNKKTKEVFVPEMAAKQQLFDELNIKGNLLASEAIKILGYKTKDWEANYHTLEGNRTNKSLYDAWLKILELEGYDENLLKLSGSDDIDVSKIEKPALEIRQMVLAVFEVLGISGAILDFDAEADGKAFEQQPAYQLWHLLYSAEDDGKKYSQEDIFTYGHDNIGLKKKLCEKFGFRPEHTKILVNVVFSDDYGNLSSKAMRRIYPFIKELTYDKACAEAGYRHSAASLTKEEIAARPLQNRLDLLKKNELRSPVVEKILNQMVNVVNTLVDDENQNRKARGLSEDFHFDEIRIELARELKKNAKERAEMTTNINTAKQSHEKIIRILQTEFGVPNPSRNDIVRYKLYEELKNNGYKDLYTNTYISRDILFSKQIDVDHIIPQMSLFDDSFSNKTVVFRKDNQDKGNKTAYDYILGKYGEQALEEYISRITSLFELGKKNKEEGIGKAKFQKLQKRLVDIGDGFIERDLRESQYIAKKANNMLYAICRSVVSTSGEITARLREDWDLVNVMQEINLPKFRALGLTEMVEKKDGAQKERITDWTKRNDHRHHAMDALAIAFTRHSHIQYLNHLNARKDEANKWHPVVSKIEEKETVLIYDDLGNRKRKFKAPMPNFREVVKEHLENVLISHKAKNKVVTKNKNKIKTVRGEKVKTELTPRGQLHKETIYGRYRYYESKEEKIGPKFDAEMIGMVTNPQYKKLLLERLAANGNDPKKAFWGKNALNKNPLYVDEARQELLPEKILLRWLNDDYSIRKDVTPENLKDIKTIEKILDKGVKKILLKRLADFGNDPKKAFSDLDKNPIWQNEAKRIAIKRVTISGIKNAAPLHHKKDHLGNDILDEKGKQIPSSFVSTGNNHHVAIYRDAEGNLQERVVSLFDAVQLVNGGEPVIDKEYNKGIGWQFLFTMKQNEMFVFPDEKTGFNPREVDLLSSGNRKLISPNLFRVQKLASKNYFFRHHLETSVEEKKELKNIAYKPQLGLNALSNIVKVRINHIGEIVSVGEY

SEQ ID NO: 582 - protein, 79 aa, Nitritalea halalkaliphila
MPLRLPERVYKMISSTGAECHFLPVNVSSLIKGYDAKSKLGEFGSQNKQEVTSDSFIRVKERCYKLEINRLGIPLNRLK

SEQ ID NO: 583 - protein, 1498 aa, Odoribacter laneus
METTLGIDLGTNSIGLALVDQEEHQILYSGVRIFPEGINKDTIGLGEKEESRNATRRAKRQMRRQYFRKKLRKAKLLELLIAYDMCPLKPEDVRRWKNWDKQQKSTVRQFPDTPAFREWLKQNPYELRKQAVTEDVTRPELGRILYQMIQRRGFLSSRKGKEEGKIFTGKDRMVGIDETRKNLQKQTLGAYLYDIAPKNGEKYRFRTERVRARYTLRDMYIREFEIIWQRQAGHLGLAHEQATRKKNIFLEGSATNVRNSKLITHLQAKYGRGHVLIEDTRITVTFQLPLKEVLGGKIEIEEEQLKFKSNESVLFWQRPLRSQKSLLSKCVFEGRNFYDPVHQKWIIAGPTPAPLSHPEFEEFRAYQFINNIIYGKNEHLTAIQREAVFELMCTESKDFNFEKIPKHLKLFEKFNFDDTTKVPACTTISQLRKLFPHPVWEEKREEIWHCFYFYDDNTLLFEKLQKDYALQTNDLEKIKKIRLSESYGNVSLKAIRRINPYLKKGYAYSTAVLLGGIRNSFGKRFEYFKEYEPEIEKAVCRILKEKNAEGEVIRKIKDYLVHNRFGFAKNDRAFQKLYHHSQAITTQAQKERLPETGNLRNPIVQQGLNELRRTVNKLLATCREKYGPSFKFDHIHVEMGRELRSSKTEREKQSRQIRENEKKNEAAKVKLAEYGLKAYRDNIQKYLLYKEIEEKGGTVCCPYTGKTLNISHTLGSDNSVQIEHIIPYSISLDDSLANKTLCDATFNREKGELTPYDFYQKDPSPEKWGASSWEEIEDRAFRLLPYAKAQRFIRRKPQESNEFISRQLNDTRYISKKAVEYLSAICSDVKAFPGQLTAELRHLWGLNNILQSAPDITFPLPVSATENHREYYVITNEQNEVIRLFPKQGETPRTEKGELLLTGEVERKVFRCKGMQEFQTDVSDGKYWRRIKLSSSVTWSPLFAPKPISADGQIVLKGRIEKGVFVCNQLKQKLKTGLPDGSYWISLPVISQTFKEGESVNNSKLTSQQVQLFGRVREGIFRCHNYQCPASGADGNFWCTLDTDTAQPAFTPIKNAPPGVGGGQIILTGDVDDKGIFHADDDLHYELPASLPKGKYYGIFTVESCDPTLIPIELSAPKTSKGENLIEGNIWVDEHTGEVRFDPKKNREDQRHHAIDAIVIALSSQSLFQRLSTYNARRENKKRGLDSTEHFPSPWPGFAQDVRQSVVPLLVSYKQNPKTLCKISKTLYKDGKKIHSCGNAVRGQLHKETVYGQRTAPGATEKSYHIRKDIRELKTSKHIGKVVDITIRQMLLKHLQENYHIDITQEFNIPSNAFFKEGVYRIFLPNKHGEPVPIKKIRMKEELGNAERLKDNINQYVNPRNNHHVMIYQDADGNLKEEIVSFWSVIERQNQGQPIYQLPREGRNIVSILQINDTFLIGLKEEEPEVYRNDLSTLSKHLYRVQKLSGMYYTFRHHLASTLNNEREEFRIQSLEAWKRANPVKVQIDEIGRITFLNGPLC

SEQ ID NO: 584 - protein, 1389 aa, Oenococcus kitaharae; identical to SEQ ID NO: 241

SEQ ID NO: 585 - protein, 1535 aa, Ornithobacterium rhinotracheale
MNTILGLDLGTNSIGWALIKVLNDKTRLPLEIIDLGVVVIPTDQRTLDKFSKGESISKTAERTKQKGVRKLYERKKLRRERLHRVLNILGFLPEHYSKKIDFKKHLGQFFGNSQPKISYVENDHGKHEFIFMDSYREMLKEFSKHNIKNVPYDWTIYYLRKKALSQKISKEELAWVILNFNKKRGYYQFRDDNADENKENKIEKYYALKVTNVKKEDAQNYTITLENGWIYKNKSKISLLDWVGSTKEFISTEKFDNKGNIIKKKNGEDDRTLKLVDSEKDWIAIKKSTEDRIENYGKTVGTYLYEHLLKDPNQKLNGELINIIDRKFYKNELKQILEKQKEFHPELLNEDLFQKSIIELYPKNSTRQKELKNKDLCYLLIDDVIYYQRDLKKKNSTINKCSFESREYYLNGEKQIQKINCIAKSKPLYQEFRTLQFIKNLKVYEIIDGLEKDITSKLLPDFETKEHFFEWLNDKEKIDQLQLLSYKCFDLHDNVKNDLIAKGIKRPTEKAIRTELLEKYRWNYSKDNDRNFLLNETRFKILKYLKKVDKKLTLTNEQIESLWLLLYSAKDERELKNGLQKFSEKNKLPKKFSDIFISFPPFKKEYGAYSEKALKKLLSLVRFGKYWSFNKIDNNIQNKIMNILNGEVDDSISDRVREKTILLQDKNDFQDLPLWLASYVAYNRFSEVSEIKYWDSPDKIEFLKQHSIGNPIVEKIINETLKLIKDIWVIHGKSCKNFFSEIHIELSREIKSSSKKRAQITNNNTKNQKLNNLIKSLLIEMASDTKYENVTPYSPSQQEILKIYDEGIYSKEENSEKIKEINKIRNNNKISKSDITKYKLWLEQGYISPYTGKIIPLTKLFTAKYQKEHIIPQTKFFDDSFNNKVICEAEVNKLKDNSLAMNFIKAKGGKAVKLSDGETVTILNQEEYKQLVRTSFKKNSIKLRNLLLEEIPDTFTKRQLNDTKYISKLVLSLLSNIVREKGELESTAKRIVSTNGQITSILRNDWGLNNIWNKLITPRFERLNNINKNKIYGNWENKKGKNVFQINYLNDNLSTLNTKRIDHRHHALDALIVACTTRNHINFLNNQYAKSRNQRHDLRAKLKRRETITTEGSKKQVFKDFIKPWESFTQDALKKLETTIVNFKVNKRIINKTINWYKKWEKQKDGTYKKIQKKQTKGDAWAIRKPLHIDTIYGIVCKKLPLKSALENYKNIIDENLKHKIKELKEVNKFDNNQIINFFKECNFIFEDNNIQKVEVYDFKDNRDKTILSSSRQLIDESFTPKKIGKVLDPTIRNILLKHLNSTKYNNKFDSDGNPIKPEKLAFSPEGLKDLNKNIKHLNNNKEHQPIKRVKLFETLGNKIKVGYTQQKNKKFAETATGTNLFLGIYSDNNKRDFKTIPLILAIQREKEGLNPCPDTDEKGNQLLFSLSPNELVFVPNNEERKNPNLVDFENLSKDQIDRIYKFVSCTGSEAYFVPSRTAKPIIENENGTNNKSQRIIEFNEKTSIKNEKNEPVLIKTICWKIEVNRLGKIIKVIK

SEQ ID NO: 586 - protein, 103 aa, Parabacteroides merdae
MIVYRLFYRFLFKATKLVNFVIHKELKRQIARTGKIKFHSGGCGCQSGNYKMQNFEKGKSITTNADRTLKRSMRRNLYRCKLRRDVLIELLKKVGFIPEKQWK

SEQ ID NO: 587 - protein, 82 aa, Parabacteroides merdae
MSIWKLQYPPLDLKIYNKFLVYSRVNPLTVDEMQNFEKGKSITTNADRTLKRSMRRNLQRYKLRRDVLIELLKKVGFMSEKQ

SEQ ID NO: 588 - protein, 84 aa, Parabacteroides merdae
MSIWKLQYPPLDLKIYNKFLVYSRVNPLTVDEMQNFEKGKSITTNADRTLKRSMRRNLYRCKLRRDVLIELLKKVGFIPEKQWK

SEQ ID NO: 589 - protein, 398 aa, Pasteurella bettyae
MLANENQNKGNLTPYEWLDGKNNSKRWQDFVARVQTCCFSHRKKQHILSHKLDEKSFIERNLNDTRYVARFLCNFIADNMLLTGKGKRKVFASNGQITALLRGRWGLQKVRDDNDRHHALDAVVIACSTVAMQQKITRFVKYEEGNVFSGERIDRETGEIIPLYFPTPWKFFKENVEIRIFSENPKLELENRLPDYPQYNHEFVQPLFVSRMPTRKMTGQGHMETIKSAKRLDEGISVLKVPLTQLKLADLENMVNRERELALYEALKERLELFGNDPAKAFIEPFYKKGGALVKAVRVKKVQKSGVLVRDGNGVADNALMVRVDVFTKGGKYFLVPIYTWQVAKGILPNKAVTANIDEIDWLEMDESYQFIFTMYPNDLVKVKLKKEEFFGYYGGLD

SEQ ID NO: 590 - protein, 610 aa, Pasteurella bettyae
MNMLKPLNYILGLDLGIGSVGWAVVEIDEQGNPLRLIDVGVRTFERAEVAKTGESLALARRLARSSRRLVKRRAARIKKAKRLLKAENILLSVDEILPNDVWQLRVKGLDHKLERQEWAAVLLHLLKRRGYLSQRKNESKSENKELGALLSGVVTNHQILQTDEYRTPAEIAVHKFQAEDGHIRNQRGDYTHTFSRLDLLAEMELLFQRQTELGNLHTSSKLLENLTALLMWQKPALAGEAILKMLGKCTFEPTEYKAAKNSYSAERFVWLTKLNNLRILEQGAERALTDSERFVLLDQPYEKAKLTYAQVRTLLKLSDEAIFKGVRYQGEDKKTVESKTTLMEMKAYHQIRKALDGADLKDEWNTLKNDSALLDEIGTAFSLYKTDDDISHYLGGKLSEKVLNVLLENLNFDKFIQLSLKALQKILPLMLQGQRYDEAVSAVYGDHYGKKSAESCRLLPAIPANEIHNPVVLRTLTQARKVINAVVRLYGSPARIHIETGRKVGKSYQDRKKLEKQQEENREQRESAVKKFKEYFPNFVGEPKGKDILKLRLYELQQSKCLYSGKSFDPNRLLEKGYVEVDHALPFSRTWDDSFNNKVCLPMKTRIKAI

SEQ ID NO: 591 - protein, 199 aa, Pasteurella multocida
MACATPSMQQKITRFIRFKEVHPYKIENRYEMVDQESGEIISPHFPEPWAYFRQEVNIRVFDNHPDTVLKEMLPDRPQANHQFVQPLFVSRAPTRKMSGQGHMETIKSAKRLAEGISVLRIPLTQLKPNLLENMVNKEREPALYAGLKARLAEFNQDPAKAFTTPFYKQGGQQVKAIRVEQVQKSGVLVRENNGVADNA

SEQ ID NO: 592 - protein, 63 aa, Pasteurella multocida
MQTTNLSYILGLDLGIASVGWAVVEINENEDPIGLIDVGVRIFERAEVPKTGESLALSRRLAR

SEQ ID NO: 593 - protein, 1058 aa, Pasteurella multocida
MQTTNLSYILGLDLGIASVGWAVVEINENEDPIGLIDVGVRIFERAEVPKTGESLALSRRLARSTRRLIRRRAHRLLLAKRFLKREGILSTTDLEKGLPNQAWELRVAGLERRLSAIEWGAVLLHLIKHRGYLSKRKNESQTNNKELGALLSGVAQNHQLLQSDDYRTPAELALKKFAKEEGHIRNQRGAYTHTFNRLDLLAELNLLFAQQHQFGNPHCKEHIQQYMTELLMWQKPALSGEAILKMLGKCTHEKNEFKAAKHTYSAERFVWLTKLNNLRILEDGAERALNEEERQLLINHPYEKSKLTYAQVRKLLGLSEQAIFKHLRYSKESAESATFMELKAWHAIRKALENQGLKDTWQDLAKKPDLLDEIGTAFSLYKTDEDIQQYLEGKLPDSVINALLVSLNFDKFIELSLKSLRKILPLMEQGKRYDQACHEIYGHHYGEKNQQISQLLPVIPTQEIRNPVVLRTLSQARKVINAIIRQYGSPARVHIETGRELGKSFKERREIQKQQEDNRTKRESAVQKFKELFSDFSSEPKSKDILKFRLYEQQHGKCLYSGKEINIHRLNEKGYVEIDHALPFSRTWDDSFNNKVLVLASENQNKGNQTPYEWLQGKINSERWKNFVALVLGSQCSAAKKQRLLTQVIDDNKFIDRNLNDTRYIARFLSNYIQENLLLVGKNKKNVFTPNGQITALLRSRWGLIKVRENNDRHHALDAIVVACATPSMQQKITRFIRFKEVHPYKIENRYEMVDQESGEIISPHFPEPWAYFRQEVNIRVFDNHPDTVLKEMLPDRPQANHQFVQPLFVSRAPTRKMSGQGHMETIKSAKRLAEGISVLRIPLTQLKPNLLENMVNKEREPALYVGLKARLAEFNQDPAKAFATPFYKQGGQQVKAIRVELVQKSGVLVRQGNGVADNAPGSIVRTDVFIKNNKFFLVPIYTWQVAKGILPNKAIVAHKNEDEWEEMDEGAKFKFSIFPNDLIELRTKTECFLGYYIGPDRHNGSISLREHDSEISKGNAGVYRVGVKLALSLEKYHIDELGKNRRICRPHQRRPVR

SEQ ID NO: 594 - protein, 1056 aa, Pasteurella multocida
MQTTNLSYILGLDLGIASVGWAVVEINENEDPIGLIDVGVRIFERAEVPKTGESLALSRRLARSTRRLIRRRARRLLLAKRFLKREGILSTTDLEKGLPNQAWELRVAGLERRLSAIEWGAVLLHLIKHRGYLSKRKNESQTNNKELGALLSGVAQNHQLLQSDDYRTPAELALKKFAKEEGHIRNQRGAYTHTFNRLDLLAELNLLFAQQHQFGNPHCKEHIQQYMTELLMWQKPALSGEAILKMLGKCTHEKNEFKAAKHTYSAERFVWLTKLNNLRILEDGAERALNEEERQLLINHPYEKSKLTYAQVRKLLGLSEQAIFKHLRYSKENAESATFMELKAWHAIRKALENQGLKDTWQDLAKKPDLLDEIGTAFSLYKTDEDIQQYLTNKVPNSVINALLVFLNFDKFIELALKSLRKILPLMEQGKRYDQACREIYGHHYGEANQKTSQLLPAIPAQEIRNPVVLRTLSQARKVINAIIRQYGSPARVHIETGRELGKSFKERREIQKQQEDNRTKRESAVQKFKELFSDFSSEPKSKDILKFRLYEQQHGKCLYSGKEINIHRLNEKGYVEIDHALPFSRTWDDSFNNKVLVLASENQNKGNQTPYEWLQGKINSERWKNFVALVLGSQCSAAKKQRLLTQVIDDNKFIDRNLNDTRYIARFLSNYIQENLLLVGKNKKNVFTPNGQITALLRSRWGLIKIRENNDRHHALDAIVVACATPSMQQKITRFIRFKEVHPYKIENRYEMVDQESGEIISPHFPEPWAYFRQEVNIRVFDNHPDTVLKEMLPDRPQANHQFVQPLFVSRAPTRKMSGQGHMETIKSAKRLAEGISVLRIPLTQLKPNLLENMVNKEREPALYAGLKARLAEFNQDPAKAFTTPFYKQGGQQVKAIRVEQVQKSGVLVRENNGVADNASIVRTDVFIKNNKFFLVPIYTWQVAKGILPNKAIVAHKNEDEWEEMDEGAKFKFSLFPNDLVELKTKKEYFFGYYIGLDRATGNISLKEHDGEISKGKDGVYRVGVKLALSFEKYQVDELGKNRQICRPQQRQPVR

SEQ ID NO: 595 - protein, 134 aa, Pasteurella multocida
MVNKEREPALYAGLKARLAEFNQDPAKAFTTPFYKQGGQQVKAIRVEQVQKSGVLVRENNGVADNASIVRTDVFIKNNKFFLVPIYTWQVAKGILPNKAIVAHKNEDEWEEMDEGAKFKFSLFPNDLVELKTKK

SEQ ID NO: 596 - protein, 53 aa, Pasteurella multocida
YSKENAESATFMELKAWHAIRKALENQGLKDTWQDLAKKPDLLDEIGTAFSLL

SEQ ID NO: 597 - protein, 1366 aa, Pediococcus acidilactici
MGDRKYNLGLDIGTSSIGFAAVDENNQPIRVKGKTAIGVRLFEEGKTAADRRGFRTTRRRLSRRRWRINLLNEIFDAHLAEVDPTFLARLKESNRSNLDPKKSFQGSLLFPERKDYQFYEEYPTIYHLRKALMEEDRKFDIREIYLAVHHIIKYRGNFLNGTPMRSFKVENIELDTLFDQLNQLYAEIVPDNELAFDLAQVADVKDVLSSTTIYKMDKKKQLVKMMLLPASNKALQSENKKIVTQFVNAILNYKFKLDVLLQVETDADWSLKLNDEGADDKLEEFTGDLDENRLEIIDLLQRLHNWFSLNEITKDGNSLSAAMVEKYENHHHHLGLLKKVIENHPDAKKAKALKETYTAYVGKTDDKTQNQDDFYKAVEKNLDDSPDAKEIKRLIQLDQFMPKQRTGQNGAIPHQLHQQELDQIIEKQSKYYPFLAEPNPNVKRRKDAPYKLDELIAFKIPYYVGPLVTPEEQAQNKENVFAWMKRKAAGPITPWNFDEKVDRMESANRFIRRMTTKDTYLFGEDVLPAESMIYQKFVVLNELNNLKINGRHLSLKDKQDVYNDLFKQQKTVSIKALQNYYVTKKKAATAPTVGGLADPKKFLSSLSTYIDFKNMFGERVNDPQFQEDLEQIVEWSTIFEDRGIFKAKLQALGWLSEKQIQQLVAKRYKGWGRLSKKLLTGLKNAEGYSILDEMWRSTENFMQIQTRPEFAALIQQANEKQFEGNDPNNVWENIESILGDAYTSPQNKKAIRQVVKVVQDIEKAVGNPPEKIAIEFTREAAANPQRTQSRLRTLEKLYESAEEVVDAGLTAELAEFKENKHVLSDKYYLYFTQLGRDVYTGDTISLDKLNDYDVDHILPQSFIKDDSLDNRVLTIRAVNNGKSDNVPAKMFGKKMGSFWRYLLDNGMISKRKYNNLITDPDNISKYAQKGFINRQLVETSQVIKLTANILNGIYDKDTEIIEVPAKMNSQMRKMFDLVKVREVNDYHHAFDAYLTIFIGKYLYKCYPKLRPYFVYGKFKKFGDNEDIEVGDGRFNFLNRIERLKNVTDPETGEILWSNVAPNETIKQIKKVYNYKFMLVSRETTTRRAELFNQTVYPKNYRGKLIPIKEDRPTDLYGGYSGNTDAYLAIVALEDKKKGKYFKVVGIPTRAAAKLEKLKQQDSQQYLQALHKVIAPQFTKSTKKGIKKTEFEIVLDKVHYRQLVQDGPVKMMLGSSTYKYNAKQLVLSEKALQVIADDRKFDETQKDDNLIAVYDEILSIVNQSFDLYDINGFRKKLNDNRDQFIDLPAETKYEGRKVVAHGKREMILEILKGLHANAAFGNLKPIGFSTAFGQLQVPNGIILSKNAILIHQSPSGLFERKIKLSDL

SEQ ID NO: 598 - protein, 1229 aa, Pediococcus acidilactici; identical to SEQ ID NO: 130

SEQ ID NO: 599 - protein, 270 aa, Pediococcus lolii
LFNQTIYSAKASKTMIPIKNDRPTKLYGGYSGNEDAYMSIIRLSDKKKTYKVVGISMRDASKLKAYENNAHEEYLKKLKEVIEQQFLDSGKKTKADFEIVIPKVNYHQRMQDGTKQFRIGSSKYVHNTKQLVLSEKTLKAIRNNKQYNGDAEKDLINAFDEILTIVNDSFSIFDIRSFRKKLNESRDKFVSLPVEDTKEKSKVIKGKRETLKQILIALHANGTSQDIPQLGLKSFGKMVKTGGLTLSENTALIHQSPSGLFEHKIKLSDL

SEQ ID NO: 600 - protein, 1016 aa, Pediococcus lolii
MNGIFDAHLAEVDPTFLARLKESNRSNLDPKKSFQGSLLFPERKDYQFYKEYPTIYHLRKALMEKDRKFDIREIYLAVHHIIKYRGNFLNGTPMRSFKVENIELDTLFDRLNQLYEEIIPDNELAFDLEQVADVKEVLSSTTIYKMDKKKQLVKMMLLPASNKALQSENKKIVTQFVNAILNYKFKLDVLLQVETDADWSLKLNDEGADDKLEEFTGDLDENRLEIIDLLQRLHNWFSLNEITKDGNSLSAAMVEKYKDHRHHLELLKKVIEDHSDAKKAKALKETYTAYVGKTDDKTQNKDDFYKAVEKNLDDSPEAKEIKRLIQLDQFMPKQRTGQNGAIPHQLHQQELDQIIEKQSKYYPFLAEPNPNVKRRKDAPYKLDELIAFKIPYYVGPLVTPEEQAQNKENVFAWMKRKAAGPITPWNFDEKVDRMESANRFIRRMTTKDTYLFGEDVLPAESMIYEKFVVLNELNNLKINGRHLSLKDKQDIYNDLFKQQKTVSIKALQNYYVTKKKAATAPTVGGLADPKKFLSSLSTYIDFKNMFGERVNDPQFQEDLEQIVEWSTIFEDRGIFKAKLQALGWLSEKQIQQLVAKRYKGWGRLSKKLLTGLKNAEGYSILDEMWHSTENFMQIQTRPEFAALIQQANEKQFEGNDPDNVWENIENILGDAYTSPQNKKAIRQVVKVVQDIEKAVGNPPEKIAIEFTREAAANPQRTQSRLRTLEKLYESAEEVVDAGLTAELAEFKENKHVLSDKYYLYFTQLGRDVYTGDTISLDRLNDYDVDHILPQSFIKDDSLDNRVLTIRAVNNGKSDNVPAKMFGKKMGSFWRYLLDNGMISKRKYNNLITDPDNISKYAQKGFINRQLVETSQVIKLTANILNGIYDKDTEIIEVPAKMNSQMRKMFDLVKVREVNDYHHAFDAYLTIFIGNYLYKCYPKLRPYFVYDNFKKFGNKEDIGHKRFNFLGKIERDKKVVAPETGEILWSNVAPNETIKQIKKVYDYKFMLTSHETYTKHG

SEQ ID NO: 601 - protein, 1333 aa, Planococcus antarcticus
MKNYTIGLDIGVASVGWVCIDENYKILNYNNRHAFGVHEFESAESAAGRRLKRGMRRRYNRRKKRLQLLQSLFDSYITDSGFFSKTDSQHFWKNNNEFENRSLTEVLSSLRISSRKYPTIYHLRSDLIESNKKMDLRLVYLALHNLVKYRGHFLQEGNWSEAASAEGMDDQLLELVTRYAELENLSPLDLSESQWKAAETLLLNRNLTKTDQSKELTAMFGKEYEPFCKLVAGLGVSLHQLFPSSEQALAYKETKTKVQLSNENVEEVMELLLEEESALLEAVQPFYQQVVLYELLKGETYVAKAKVSAFKQYQKDMASLKNLLDKTFGEKVYRSYFISDKNSQREYQKSHKVEVLCKLDQFNKEAKFAETFYKDLKKLLEDKSKTSIGTTEKDEMLRIIKAIDSNQFLQKQKGIQNAAIPHQNSLYEAEKILRNQQAHYPFITTEWIEKVKQILAFRIPYYIGPLVKDTTQSPFSWVERKGDAPITPWNFDEQIDKAASAEAFISRMRKTCTYLKGQEVLPKSSLTYERFEVLNELNGIQLRTTGAESDFRHRLSYEMKCWIIDNVFKQYKTVSTKRLLQELKKSPYADELYDEHTGEIKEVFGTQKENAFATSLSGYISMKSILGAVVDDNPAMTEELIYWIAVFEDREILHLKIQEKYPSITDVQRQKLALVKLPGWGRFSRLLIDGLPLDEQGQSVLDHMEQYSSVFMEVLKNKGFGLEKKIQKMNQHQVDGTKKIRYEDIEELAGSPALKRGIWRSVKIVEELVSIFGEPANIVLEVAREDGEKKRTKSRKDQWEELTKTTLKNDPDLKSFIGEIKSQGDQRFNEQRFWLYVTQQGKCLYTGKALDIQNLSMYEVDHILPQNFVKDDSLDNLALVMPEANQRKNQVGQNKMPLEIIEANQQYAMRTLWERLHELKLISSGKLGRLKKPSFDEVDKDKFIARQLVETRQIIKHVRDLLDERFSKSDIHLVKAGIVSKFRRFSEIPKIRDYNNKHHAMDALFAAALIQSILGKYGKNFLAFDLSKKDRQKQWRSVKGSNKEFFLFKNFGNLRLQSPVTGEEVSGVEYMKHVYFELPWQTTKMTQTGDGMFYKESIFSPKVKQAKYVSPKTEKFVHDEVKNHSICLVEFTFMKKEKEVQETKFIDLKVIEHHQFLKEPESQLAKFLAEKETNSPIIHARIIRTIPKYQKIWIEHFPYYFISTRELHNARQFEISYELMEKVKQLSERSSVEELKIVFGLLIDQMNDNYPIYTKSSIQDRVQKFVDTQLYDFKSFEIGFEELKKAVAANAQRSDTFGSRISKKPKPEEVAIGYESITGLKYRKPRSVVGTKR

SEQ ID NO: 602 - protein, 211 aa, Porphyromonas catoniae
MGKKVLGLDLGVGSIGWCLITLDKDEKPQSILGMGSRIVPLSADDATEFTQGKAITKNKMRTVARTIRKGMDRYQLRREALKKVLREHAMLPDEALIKLPLLELWELRARAATPGEQVSLTELGRVLLHINQKRGYKHAKADEAAEAETKKGKETGYVAQVKGRYQILKEKGLTIGQHFAGELRANQQTAPRGTYYTYRIKEQVYPRVRGV

SEQ ID NO: 603 - protein, 1009 aa, Porphyromonas catoniae
MRIIREAYIEEYDRIMAVQRVFYPELLTDALIGRIRDRIIFYQRPLKSCKQLVSFCEFEKKEKVIRVKHTNKEGVQELVEKTITIGPKVAPKSSPIFQVCKVWESIHNIRLYHPDGTERKLEQEEKQKLFDYLQRNDKLSLTTLRKELKIKPKDKLWCDKLLEKGIAGNTTAAILRKAFKGYEHYERLFRFDLVRRDSHEADEDGVIRPIIDESYQNEPLYKLWHILYSIEDRAEMRSALIGQLGIKAEDLDNGLMDALYKIDFVKQGYGNKSAKFICKLLPHLQEGKMYSEAAEAAGMRHSDSMTAQERDERNLLEEIPLLQKNALRQPVVEKVLNQMINLVNALKREHGEIDEVRVELARELKMSREEREKATKNNSSREKENKAIAERITEYGLTPTKSRIQKYRLWQESAESCIYCGKRVDVVQFLRGEETEVEHIIPKSILFDDSLSNKACACRSCNQEKGNRFAMEYIQAKGWEQDYIERVDSLFHDKKISYSKRQHLLMLPKDLPEDFIERHLRLSQYISREAQGILRKGIRLVSASEGGVTAKLRQLWGYDNILRDLNLERYKSMGETEVVTVEHRDGQRTDERIKDWSKRKDHRHHAIDALVVACTRQSYIQRLNRVNAEADRQEMDAFIKEQQQEHKLSKKEKLSLLENWLKEQPHFTTGEVKEHAEGILISFRPGKRTVSRGRNIYKRSGKTDVQRNVLIPRGALSEETVYGVISVDGENKVVCKYPLQKFLDTKETNVDKIADQAAEKIVDKVLREKIRERIKRYGKKEAFAEPLYLDEAQTQVVRSVRCFISKDQAKLIPLRYNDESEAVGFVAPGNNHHLALYRDASGKMRASVVSFFAAVERARYGIPMIVLNPRETREKARIIPDLPESIFSKLPEEDWVLEETLQEGEMVLLGMENDAIEEAIKKKDYSKLSRYLYRVQSLSYNDYKFCFHLETESEKKEKKKGEDKKRGEKAKNTAVMPPKRYRIRCLATYQEDLNPRKVKIDLLGRISLA

SEQ ID NO: 604 - protein, 1197 aa, Porphyromonas sp.
MLMSKHVLGLDLGVGSIGWCLIALDAQGDPAEILGMGSRVVPLNNATKAIEAFNAGAAFTASQERTARRTMRRGFARYQLRRYRLRRELEKVGMLPDAALIQLPLLELWELRERAATAGRRLTLPELGRVLCHINQKRGYRHVKSDAAAIVGDEGEKKKDSNSAYLAGIRANDEKLQAEHKTVGQYFAEQLRQNQSESPTGGISYRIKDQIFSRQCYIDEYDQIMAVQRVHYPDILTDEFIRMLRDEVIFMQRPLKSCKHLVSLCEFEKQERVMRVQQDDGKGGWQLVERRVKFGPKVAPKSSPLFQLCCIYEAVNNIRLTRPNGSPCDITPEERAKIVAHLQSSASLSFAALKKLLKEKALIADQLTSKSGLKGNSTRVALASALQPYPQYHHLLDMELETRMMTVQLTDEETGEVTEREVAVVTDSYVRKPLYRLWHILYSIEEREAMRRALITQLGMKEEDLDGGLLDQLYRLDFVKPGYGNKSAKFICKLLPQLQQGLGYSEACAAVGYRHSNSPTSEEITERTLLEKIPLLQRNELRQPLVEKILNQMINLVNALKAEYGIDEVRVELARELKMSREERERMARNNKDREERNKGVAAKIRECGLYPTKPRIQKYMLWKEAGRQCLYCGRSIEEEQCLREGGMEVEHIIPKSVLYDDSYGNKTCACRRCNKEKGNRTALEYIRAKGREAEYMKRINDLLKEKKISYSKHQRLRWLKEDIPSDFLERQLRLTQYISRQAMAILQQGIRRVSASEGGVTARLRSLWGYGKILHTLNLDRYDSMGETERVSREGEATEELHITNWSKRMDHRHHAIDALVVACTRQSYIQRLNRLSSEFGREDKKKEDQEAQEQQATETGRLSNLERWLTQRPHFSVRTVSDKVAEILISYRPGQRVVTRGRNIYRKKMADGREVSCVQRGVLVPRGELMEASFYGKILSQGRVRIVKRYPLHDLKGEVVDPHLRELITTYNQELKSREKGAPIPPLCLDKDKKQEVRSVRCYAKTLSLDKAIPMCFDEKGEPTAFVKSASNHHLALYRTPKGKLVESIVTFWDAVDRARYGIPLVITHPREVMEQVLQRGDIPEQVLSLLPPSDWVFVDSLQQDEMVVIGLSDEELQRALEAQNYRKISEHLYRVQKMSSSYYVFRYHLETSVADDKNTSGRIPKFHRVQSLKAYEERNIRKVRVDLLGRISLL

SEQ ID NO: 605 - protein, 1422 aa, Prevotella denticola
MTQKVLGLDLGTNSIGSSVRNLDLSDDLKGQLEFFSSDIFRSSVNKESNGREYSLAAQRSAHSRSRGLNEARRRKLWATLDLLIKYGFCPMSPESLMRWRTYDKQRGLFREYPIDDKNFNAWILLDFDGDGKPDYSSPYQLRRELVIRQFDFDQPIERYKLGRALYHIAQHRGFKSSKGETLSQQETNSKQSLTDDTADVAGEMKASEEKLSKGLSTYMKENNLLTVGAAFAQLEDEGVRVRNNNDYRAIRSQFQREIETIFKFQQGLSVENELYERLVSEKKNIGTIFYKRPLRSQRGNVGKCTLERTKPRCAIGHPLFEKFRAWTLINNIKVRMSEEEQAEQLPMKLRFELYNDCFLAFVRAEFKFEDIRKYLEKRLGVHFSYNDKTINYKDSTSVAGCPITARFRKLLGEDWESFHVDGQKQRQAHGKNNASFHTVSYSTNDIWHFCYDAEEPEAVLSFAQDNLKWEKKKAEELVRIWSAIPQGYAMLSQKAIRNINKMLILGLKYSDAVLLAKVPEIVEITDGEILSVTEDYHRVEAQVGYEKQINNIVNALIAKYKSASEEYRFADHNYEYQLDKSDEKDIIKQIESNIGTRKWSLLDADEQTDILQKVRDKYQNFFRSHERKFVESPKLGECFEEYLMKKFPMVEGERWKKLYHPSQIAIYRPVPANKDRSALRLGNPDIGAIKNPTVLRVLNTLRKRVNQLLDDGIISPDETRVVVETARELNDANRKWALDTYNRIRHDENEKIKKILAEFYPKRDNISTVDIDKARYVIDQREMDYFTEAKTYHKDIKKYKLWLEQGGQCMYTGRTINLSNLFDPNSFDVEHTIPESISFDSSDMNLTLCDAHYNRFIKKNHIPADLPNYDKSVVIDGKEYSPIKPRLQRWADRVERLNRNVEYWRGQARRAQNKDRKDQCMREMHLWKMELEYWTKKLERFTITEVTDEFKNSQLVDTRVITRHAVLYLKSIFPHVDVQRGDVTAKFRKILGIQSVDEKKDRSLHSHHAIDATTLTIIPGAAKRERMLELFAKIEEVNKMLSFSGNEDRTGLKQELDGLKNQLNKEVKACRIGHNVSEIGTFINDNIIINHHVKNQALTPVRRRLRKRGHIVGGMDNPRWQTGDALRGEIHKASYYGAITQYAKDKEGKVLMKEGRPQINPTIKFVIRRELKYKKSSTDSGFASWDDLGKAIVDKELFALMKGQFPEGTSFKDACEQGIYMIKKGKNGEVDTKLYRIRHIRCKTKQKNALKIKEQAYKSEKEYKRYFYAAVGDLYAMCCYTNGKTREFKIYSLYDISCHRKVGVEDIPEFITDKKGNRLMLDYKLHTGDMILLYKENPEELYDLDNVSLSKLLYKINGFENDGLRIRMVNHLVAKEAMGESVKDYAKLPDIIRCGVKTIKFLVMGENRDFVIKNGKISFNHR

SEQ ID NO: 606 - protein, 443 aa, Prevotella disiens
MELDYWKGKYNRFTMTEIPEGFSRRQGMGIGLISRYAGLYLKTIFHKKDNPQKSNVYIVKGSITAEFRRIWNIQDDYEKKCRDNHIHHCIDAIVVGCIGKREYDLMAQFYRDEEKYRWEKKKKPFFKKPWETFTQDMLSLKDEVLTVHFNPSNFTKKAHKKVFTPKGIFVAQGDCARVKLHKESYFGAIEQKGEIKYVMRKELSALKIEDIKNIVDAVVKEKVLAVVKKKGFKQAMAEPIYMNEDKRILIKKVRLFVSQTNPLIVKKHRDLSSKEYKQNYYVDNEGNLMIAMYEGVKKNGKIDREITVVNNLEAAKFFRQSQKNNAEKQLISHLSPKNGYPLKTVLTQKQLVLMYEDSPKEIKLRDTKNMVKRLYQVVEIEKDGRVKLKFHQEARSEGLNKNSAAFKIQDTPESLYRHTKSNLKVLVNGVDFKINILGEISLI

SEQ ID NO: 607 - protein, 1375 aa, Prevotella histicola
MKKILGLDLGTTSIGWALVYESENTDEKSSIVRLGVRVNPLSVDEKGNFEKGKAITTNADRQQTHGARINLQRYKLRRENLKDCLQKQGWIGTEALCEEGKTSTFETYMLRAKAAEEEISLHELCRVLFMMNKKRGYKSNRKANNKEDGKLFDGMTVAKKLYEEHLTPAEYSFQLLSSGKKFKQEYYRSDLKEEFDRIWNEQQKYYPEILTDDFKQQLQGKSKGNTSKIFLGKYGIYSADLKGLDRKLQPLKWRVEALKQQVDKEVLAFVISDLNGQIASTSGLLGAISDRSKELYFNKQTVGQYLWTSLKETPHVSIKNKPFYRQDYLDEFEKIWETQATYHKELTPELKQEIRDIIIFYQRPLKSKKGLISVCELEQRKVKVTIDGKEKEISIGPKVAPKSSPMFQEFRIWQNLNNILLIDKGNNSIHPLYEEEKNLLYEELSVKEKLSKAEALKVLNKNSKQWDLNYKEIEGNRTQAVLYDCYNRIIVMTGHEEYNFKKLKASEIRSYVKTTFTGLGFNTDILEFDSSLTGHELEKQPMYQLWHLLYSYESDNSRTGNDALLRKLETAFGFPKEYAAVLSDVVFEDSYGNLSVKAMRKILPHLQAGLNYSQACEEAGYKHSRRSLTKNELDQKEYKEKLELLPKNSLHNPVVEKILNQMINVINAVIDEYGKPDEIRIELARELKIGAAERENMTRSINQGNAENKRIREILEKEFALSYISRNDIIKYKLYEELKSNGFKTLYSDTYISKDKLFSKDFDIEHIIPKARLFDDSLSNKTIEARDVNIAKSNKTAFDFISEKYDQQGIEAYKKKLDILLQDGSISKAKYNRLLMKEADIPSGFIDRDLRDTQYIAKKAYEILSDLVRNVTPTTGAVTSRLREDWQLVDVMKELNFEKYQKLGLVEVIEDRDGRKIKRIKDWTKRNDHRHHAMDALTIAFTKPSYIQYLNNLNARSDKNSSIYGIENKELHREDNKLRFNAPLPINEFRAEARRHLKSILVSVKAKNKVMTQNVNVIKTKHGVIKKVQLTPRGELHNATFYGTKKRPIIKMVKVGAALDEVTIKKVSSSFIREALLDRLHEYNGDAKKAFTGRNSIDKNPIYIDEEHKKTVPALVKTIEWEMYHPTRKLISPDLKIDKVIDKGIREILKTRLAKFNGDAQKAFSNLDENPIYKDEAKKITLKRVSLEGVSSVIPLHTLKDREGKLVVGKDGKPVLGDYVQTSNNHHIAFYMDENGNLQDNVVSFFEAAERKSQGVPVIDKNYNHDKGWNFLFTMKQNEYFVFPNEVTGFNPSEVDLMDEANYSIISPNLYRVQKMSKASGRDYWFRHHLEAMLNDDPKLRNSMFKRITSLKALEGIVKVRINCIGKIVAVGEYD

SEQ ID NO: 608 - protein, 1380 aa, Prevotella intermedia
MKRILGLDLGTTSIGWALVNEAENNNEASSIVRLGVRVNPLTVDEKSNFEKGKAITTNADRQLRHGARINLQRYKLRRQNLHDCLQKQGWLGTEAMYEEGKASTFETYKLRAKAAEEEISLHEFARVLFMLNKKRGYKSNRKANNKEDGQLFDGMTIAKKLYEEHLTPAEYSLQLLNKGKKFTQGYYRSDLNAELERIWDEQKKYYPEILTDEFKQQLEGKTKTNTSKIFLAKYGIYSADLKGLDRKFQPLKWRVEALQQQVDKEVLAFVISDLKGQIANTSGLLGAISDRSKELYFNKQTVGQYLWASLEENPHISIKNKPFYRQDYLDEFEKIWETQAAFHKQLTPELKQEIRDIIIFYQRPLKSKKSLISVCELEQRKVKATIDGKEKEITIGPKVAPKSSPVFQEFRIWQNLNNVLLIDNDTNEKRPLDEVERNLLYKELSIKAKLSKTEALKILNKKGKQWDLNYRELEGNRTQAILFDCYNRIITLTGHEECDFKKIKASEIRHYVSTIFKNLGFSTEILDFDPSLKKHELEKQPMYQLWHLLYSYESDNSRTGNESLLRKLETTFGFPEEYATVLCDVVFEEDYGNLSVKAMREILPYLQAGNDYSQACAYAGYNHSRHSLTKEELDQKVYKERLELLPKNSLRNPVVEKILNQMINVINAIIDEYGKPDEIRIEMARELKSSAADRKKTTHAISQGNAENQRIREILEKEFSLSYISRNDIIKYKLYEELEPNYYKTLYSDTYITKDKLFSKDFDIEHIIPKARLFDDSFSNKTLEARNINLEKSNKTAFDFIKEKYGEDGAEAYKKKLDMLLENDAISRPKYNNLLRAEADIPSDFINRDLRNTQYIAKKACEILGELVKTVTPTTGKITNRLREDWQLVDVMKELNFEKYEKLGLTEIVEDRDGRKIKRIKDWTKRNDHRHHAMDALAIAFTKPSFIQYLNNLNARSNKGDSIYAIENKELHYEEGKLRFNAPIPVNEFRAEAKRHLSAILVSIKAKNKVMTQNVNKIKTKHGIIKKIQLTPRGPLHNETIYGTKMRPIIKMVKVGAALDEATINKVSSPAIREALLKRLNEYSGNAKKAFTGKNTLEKNPIYLNAGRTKTVPSLVKTVEWESFHPTRKLIDKDLNVDKVVDKGIREILKARLEEFNGDAKKAFSNLEENPIYLDEAKKIALKRVSIEGVLSAIPLHTLKNQAGKPITGKDGKPVLGNYVQTSNNHHIAFYYDEDGNLQDNAVSFFEAAERKSQGIPVIDKDYNRDKGWRFLFTMKQNEYFVFPNEATGFIPSEVDLTDEANYGIISPNLYRVQKVSRIDKGTSASRDYWFRHHLETILNDDAKLKNLAFKRIRGLLELKDIIKVRINSTGKIVAVGEYD

SEQ ID NO: 609 - protein, 129 aa, Prevotella multiformis
MQKGGTGCKINRQTVGNVEVNVLNLRLYDRTDDREVTAGYLPTKEDYVRLFVYLNDRKEINQDTLLKDYFRLKKVKCGNEKEFAIRWNYIEDKEKKYPCNETRHELLAALDRAGMEHGWLDDSGTSARW

SEQ ID NO: 610 - protein, 535 aa, Prevotella multiformis
MVKGLLSNIVRTAEEREETSKFVISCTGRITDRLKQDWGLNDVWNSLVYTRFKRLNELTETEAFGHWQDKDRRVFQTSVPLELQRGFSKKRIDHRHHAMDALVIACASRNIIGYLNNESAESPEKREDLRRKLCDKNHIIRKPWESFTQDARAALEDIVVSFKNYVRIINKATNYYERYDADGRKTKAEQKGGEMWAVRKPMHEATYYGKVNLRRKERVSLKAALEDIPSICNRDLRDYINGLVEKHFNKEQVLAQFRSVGNRWNKQHIDKVDVWRFSDGKEEMVATRKPLDTSFDAKRIEAVTDTGIQRILSNYLEAKGGDPKIAFTPEGIADMNQHITAYNNGKQHKPILKVRVSTKLGKKYPVGQTGCKAGQFVVAEAGTNLYFAVYEDGEGNRSYDTIPLNEAVECLKQGLPPVPETREKGDRLKFYLSPNDLVYVPAGDEENEIDRERIYKFVDSSGTTANFIPHRTAGLIYNVDKKLAEALCNGSIIQNEYGVGSQQSKNQKALTGEMVKAVCWKLEVDRLGNILRIIK

SEQ ID NO: 611 - protein, 1380 aa, Prevotella nigrescens
MKRILGLDLGTTSIGWALVNEAESNNEASSIVRLGVRVNPLTVDEKSNFEKGKAITTNADRQLRHGARINLQRYKLRRQNLHDCLQKQGWLGTEAMYEEGKASTFETYKLRAKAAEEEISLHEFARVLFMLNKKRGYKSNRKANNKEDGQLFDGMTIAKKLYEEHLTPAEYSLQLLNKGKKFTQGYYRSDLNAELERIWDEQKKYYPEILTDEFKQQLEGKTKTNTSKIFLAKYGIYSADLKGLDRKLQPLKWRVEALKQQVDKEVLAFVISDLKGQIANTSGLLGAISDRSKELYFNKQTVGQYLWASLEENPHISIKNKPFYRQDYLDEFEKIWETQATFHKQLTPELKQEIRDIIIFYQRPLKSKKSLISVCELEQRKVKATIDGKEKEITIGPKVAPKSSPVFQEFRIWQNLNNVLLIDNDTNEKRPLDEDERYLLYKELSIKAKLSKTEALKILNKKGKQWDLNYKELEGNRTQAILFDCYNRIITLTGHEECDFKKIKASEIRHYVSTIFKNLGFSTEILDFDPSLEKHELEKQPMYQLWHLLYSYESDNSRTGNESLLRKLETTFGFPEEYATVLCDVVFEEDYGNLSVKAMRKILPYLQAGNDYSQACAYAGYNHSRHSLTKEELDQKVYKERLELLPKNSLRNPVVEKILNQMINVINAIIDEYGKPDEIRIEMARELKSSAADRKKTTHAINQGNDENQCIREILEKEFALSYISRNDIIKYKLYEELKPNGFKTLYSDTYIPKDKLFSKDFDIEHIIPKARLFDDSYSNKTLEARDINLAKSNKTAFDFVKEKYGEQGAEAYKKKLDMLLGNNVISKPKYNKLLMTEADIPSDFINRDLRNTQYIARKACEILGELVRTVTPTTGKITNRLREDWQLVDVMKELNFEKYEKLGLTEIVEDRDGRKIKRIKDWTKRNDHRHHAMDALAIAFTKPSYIQYLNNLNARSNKGDSIYAIENKELHYEEGKLRFNAPIPVNVFRAEAKRHLSAILVSIKAKNKVMTQNVNKIKTKHGIIKKIQLTPRGPLHNETIYGTKMRPIIKKVKVGAALDEATINKVSSPAIREVLLKRLNEYSGNAKKAFTGKNTLDKNPIYLNAERTKTVPASVKTVEWENYHPIRKPITPDLKVDKVIDKGIGEILKARLEEFNGDAKKAFSNLEENPIYLDQTKKIALKRVSIEGVLSTIPLHTLKNQAGKPIMGKDGKPVLGNYVQTSNNHHIAFYYDEDGNLQDNAVSFFEAAERKSQGISVIDKDYNRDKGWRFLFTMKQNEYFVFPNEATGFIPSEVDLTDEANYGIISPNLYRVQKMSRIEKGTSVSRDYWFRHHLETILNDDSRLKNSAFKRINSLKPLEGIIKVRINSIGKIVAVGEYD

SEQ ID NO: 612 - protein, 1506 aa, Prevotella nigrescens
MKTILGLDLGPNSIGWAKVEVDDEGNYLRNIKLGSRIIPMTQDMLGDFDKGVKVSQTAIRTDFRGNRRLIERHLLRRERLHRVLHALKFLPKHYEDAIGWDRNEPATYGKFVNNSEPKLAWERQEDGSMRFLFMESFNEMVADFAQNQPSLVSDGKKIPLDWTIYYLRKKALTRPIKKEELAWILLNFNQKRGYYQLRGEEEEDNLTKRKEYYKLKVVGVEADGAPKGGKTWYNIHLENGWTARCQSKIPLDDWVGKVKEYIVTTEYEDDGKTPKCDKEGKVKRSFKSPEKDDWQLIKTRTEKFIDDSNKTVGAFIYDYLLEKPFDKIRGKYIRTIERKYYKNELREILREQTKYHEGLHSLEALKICAEELYKNNQQHQEYLLKKDMTFLLLNDLIFYQRPLKSKKSLIADCPYEVYKYDDKLTGKKGQKKIKCIAKSNPYYQEFRLWQFIANLRLFSVTDGKEVTAEYLKTEEDYVRLFSFLNDRKDIKQETFLRSFLKLKKESIGSEKIYPIRWNYIEDANKSYPCNATRHELLLAFDRADIPRELLDVEEREYRLWHLLYSIEAKEETESALRKLKANKAFGDLNIDDAFVNSFLKIKPFEKEYGAYSEKAIKKLLAVMRRGSLWKEADICEATKQNIAKILQNDIDEKLKKKIEAAVSSFNKLSDFQGLPTWLACYVVYGRHSEAAQIQCWQSPEDLKTYINKFKQHSLRNPIVEQCLLETLRTVYDIWKDAGQIDEIHIELGRNMKSTAEQRARKTKDILRNENTNLRIKNLLVELKNDDKIENVRPYSPSQQEILRIYEEGALQELSKEDEMFEDISKISKMAQPSPTELSRYKLWLEQKYRSPYTGRVIPLSKLFTTAYQIEHIIPQSRYFDDSFNNKVICESEVNSLKDNMLGYEFIKECGGRIVHCTLLGDVKIFTKEEYKDFVTKHYIDNTYKRDKLLLEDIPQEFSARQLNDSRYISKMVQTVLSNIVRAENEQEATSKFVVSCNGAITNRLKKDWGLNDVWSSIVCPRFKRLNEITKTNAFGHWEDKAGKHVFQTTVPLELQRGFSKKRIDHRHHAMDALVIACASRNIVNYLNNESANSPEKREDLRKKLCDEKRKIRKPWKTFTQDAREALSDVVVSFKNYVRVINKATNYYEHYSSSGNKVMISQKGNDMWAIRKPLHKESVFGRVNLCRKVIVSLKKALENIPAICDKTLRDYINALVEKHFNTRQLLAHFKSINYRLNRQCVEKVEVWQFSDEKIEMVARRKSLDTSFDDKQISSITDTGIQKILLNYLQTKDGNAEIAFTPEGIEEMNKNISLYNDGKAHQPILKVRVATPKGMKYPVGQTGNKATKFVVAEKGTNLYFAIYENELGVRSYDTIPLNIVVERLKEGLSPVPQANEADIPLKFYLSPNDLVYVPTKENEDELCRDRIYKFVDSSGTTANFVPHTSANTIYNVDKEYAEKCCNGAVFLNEYGLGSPQSKNQRALTGEMIKEICWKLKVDRLGNIIKVIK

SEQ ID NO: 613 - protein, 774 aa, Prevotella oulorum
MEQCILETLRTVYDIWKEAGQIDEIHVELGREMKQTAEQRAHLTEKVLRNENTNLRIKSLLMELKNDADMKDVRPYSPMQQEILRIYEEGALQTLSKDDAAFTEIMKISKMAQPSASELQRYRLWLEQKYRSPYTGKPISLSKLFTSAYQIEHIIPKKRYFDDSFSNKVICEAEVNGKKDSMLAYEFIKDCGGDVIHCTTLGDVTILSEAEYKALVTELYANNKSKKDKLLMEDIPQDFINRQLNDSRYISRVVMTLLSNIVRIEGEEEATSKFVIPCSGGITDKLKKDWGLNDVWNNIVYPRFERLNALTNTSDFGQWENKEGKRVFQTSVPLELQRGYQKKRIDHRHHAMDALVIACASRKIINYLNNQEANDPTKQENARKQLCIKSRIIRKPWETFTQDAYKALDNIVVSFKNYVRVINKATNYYERYNADGKKAVDEQKGEAMWAIRKPMHKDTVFGHVNLRRKAVVKLKDALENIPAICDKTLRHYIQDLQKKHFNTKQLLAHFKSINYRLNKQAVDKVEVWQYSDDKEQLAATRKPLGPSFDAKCIAAITDTGIQKILLNYLQAKGGDPAIAFTPEGIAEMNQNIAVYNGGKQHQPILKVRIAKPMGKKFPIGQTGNKAFQYVIAEEGTNLYFAIYEDEEGNRTYDTIALREVVERLKQGLTPVPEKNEKGVALKFHLSPNDLVYVPTADELLSKVCSLDKNRIYKMVSATKSECLFIPHSVAKTIYDKVEFEALNKMGRALTGEMIKSVCWKIEVDRLGHIVNIIK

SEQ ID NO: 614 - protein, 691 aa, Prevotella oulorum
MKTILGLDLGTNSIGWAKVIVDDNENYLRDIQLGSRIIPMSQDVLGKFDKGVTESQTAIRTSFRGVRRLRERTLQRRERLHRVLHTLHYLPPHYDSAIGWDRKTPTTYGKFLNHGEPKLAWERREDGTMQFLFMDAFHEMIADFAKYQPALVADGKKVPLDWTIYYLRKKALTQPIKKEELAWILLNFNQKRGYYQLRGEEDEENAAKHEEYHELKVVGVEVDEAGKGDNTWYNVKLENGWTYHRQSKIPLDDWVGKVRAFIVTTEYEKDGTTPKKDKEGNVKRSFRSPDEKDWGLRKKQTEHSLEASGTPVGAFIYDHLLKEPSDKIRGKFIHTIERKYYKQELAAILREQSKHHEKLCSKDMLKACIEELYPNNPLHRESLLKKDMPYLLIEDLIFYQRPLKSKKSLIAECPYEAYSYVDKETGEMKRQGIKCIAKSNPYYQEFRLWQLIANLRLRNRSDERDVTAEYLPHQEDYVRLFTYLNDRKEINQETLLKDFFKLKKVTIGGEKVFPIRWDYIEDKEKKYPCNATRHELLLALDRAGIEHDWLNDRDLAYRLWHLLYSVDSKDETERALRKLKDDDAFVESFLKIKPFEKEYGAYSEKAIKKLLPVMRRGSLWNEADLCPSTKERIANILQGTIDEKLKKKIGAFISSCQQVSDFQGLPEWLACYVVYGRHSEATDIQRWETPE

SEQ ID NO: 615 - protein, 242 aa, Prevotella saccharolytica
MKLVLGLDLGVGSVGWALIFITDSGEPIKILALGERIVSMDSNNSNEFSAGATCTLNQKKTKAKSVRKGYSRYVQRRDALTAELRHIGMMPDETLIKLPVLDLWQLRANAATEGKKLSLAEIGRVLYHINQRRGYKHGKSDVSSDNKQKGYVKAVNERYCMIQERQQTIGQYFALKLKETAVTTEKGTFYTFRIKDQVFPREAYEEEFVVAYSTKVLKFKQITTLLNVVICLMMLLLIVQRY

SEQ ID NO: 616 - protein, 1174 aa, Prevotella sp.
MEFHPELCDAELLKACAEELYRNNEAHRAQLLAKDFKHLLVEDVLFYQRPLKSKKSLIANCPYETRQYINKETGEIKDVNVKCIAKSNPYFQEFRLWQWISNLRLLRQADGQDVTAAYIKGNEDKERLFDLLNNQGEIKQEHILRDFLKLKKPKGGEFPLRWNYVDDKIYPANETRHAINKAIKGMAVDKEEKETLGQLLDQPAVAYMLWNLLYSITDRNELARALRRFALTHGVSSVDAFVESFLKVKPFKKEYGAYSEKATKKLLQVMRLGKYWCGDELPEPAKRTKGNKQAVYDEMAHRGICKQTLQNISNIIEENIDERLMGALLNPERPLTELSHFQGLSVSDACYVVYGRHSEVAEIVKWKDADELNTFINNFKQHSMRNPIVEQCVLETLRTVRDVWEQEGQIDEIHVELGRNMKRTAEQRARDTQAIQRNENTNMRISLLLTELKNDPSISDVRPYSPSQRELLKIYEEGALENLTNQDEDIAKISRLAQPSASELRRYKLWLDQKYVSPYTGRPIPLAKLFTPAYEIEHIIPQSRYFDNSFSNKVICEAEVNKLKDNLLGMEFIKKFGGKTKGILDEEAYKLHVTTNYAHNPAKRSKLLMEDLPTDFNSRQLNDTRYISKTVMALLSNVVREEGERETRSKHVVVCTGGVTDTLKKDWGLHDVWHNLVYPRFIRLNNLTGSQNFGYWRYLNEENSKKGEDSKKVFQITLPPECQRGFVKKRIDHRHHAMDALVIACASANIVNYLNNQSAANPHIHENLQRLLCDRKREIRKPWPTFTQDAQAALKDLVVSFKNTVRVVNKASNTYLRYDKDGKKKRFKQEGEGLKAIRKPMHKETYYGEVNLIRKEMVPLKRALDDVNAIVDKELRASIKGLLRDGFNPQQVLANFKAKDFKFDKRDIKKVEVYVSSEKSTPMVATRKSLDTSFNAKRIADITDTGIQKILLNYLKANDNSPEQAFTPEGIAYLNEHIAEYNDGKPHQPILKVRVSEVKGAKFAVGQTGSKKDKFVEAQSGTNLYFAIYEDKEGKRHFETIALKVAAERLKDKQMPVPEINDAGLPLKFYLSPNDLVYVPTDEDRATAHPSIDKMRIYKMVSATDRQCFFLPFTVASVISNKVEFEALNKMERVLDASEYSSAYDSSHVNKVMVKNVCWKLEVDRLGNITKIVR

SEQ ID NO: 617 - protein, 992 aa, Prevotella sp.
MITRILGLDTGTNSLAWAVVDRDANGNYTLVKRGDVIFTEGVKIEKGIESSKAAERTAHKALRVHYSRRRLHKIDTLKVLVELNLCPCLSDEQLSQWKAKKTYPLTDDFMLWQRSGSAEENNPYYCRHRCLTQKLDLTDQSQRFLLGRAFYHLAQRRGFLSNRLDTSADSDESGKVKSGIAQLSVEMEKAGCEFLGEYFYQLYKQHGNTIKLRSRYTDREEHYKKEFLAICEKQELDPKWVEALQRAIYFQRPLKSQRKGVGKCTFEPKKPRCAESHPDYEAFRMLCFLNNVKIQTPNDTSLRPLNEDEREKIWPIFFRKSKPNFDFEDIAKALAGKNNYAWYKDAGEKPFKFNYRMQQGVSGCPVTAQLIDIFGSDWQTAIAETYTAVEKKNGTKTIDEMADDVWNVLYSFSSKDKLKAFATEKLQLDEASATKFANAKLPHGFASLSLKAIRNILPFLRQGFIYAHAVHLAKIPDIVTKAVWNDADKREMILSGLMEIIENYNPKDRGVEGTIDFCIKSHLQDVIDLRPGAADALYHPSMIETYPDAKLNKMGVFQLGSPRTNAIRNPMAMRSLHILRSVVNQLLRDGIIDRDTEVHVEYARELNDANKRKAIADYQREQEKKRKQYRDDIIALYKSECHKEIEPTDTDILKFQLWEEQNHLCLYTGTQIGICDFLGDNPKFDIEHTVPRSVGGDSTQMNLTLCDATFNRQVKGAQLPSQLSNHADILVRIDHWKSKCEDLRKQLDKIRTYGGMEKNMKDRLIQKRHRLKMDLDYWQGKYSRFTMTEVPEGFSRRQGAGIGLVSKYAGLFLKSLFHNEQNPNKSNVYVVKGVTTAEFRRMWGLQGEYEKKSRLNHCHHCIDAITIACIGKAEYDKMAQYYHDEELFQWRGTTTKPHFNKPWPTFTEDVLAIEQSLLVKHLTKDNMPKQAKKRVRTATGKYLAQGDTARGSLHKDTYYGAIEQNGEIRYVLRKPLNKFENEAELEKIVDQA

SEQ ID NO: 618 - protein, 1375 aa, Prevotella sp.
MKKILGLDLGTTSIGWALVNESENKDEQSSIVRLGVRVIPLTVDEKGNFEKGKAITTNADRQQVHAARINLQRYKLRRENLRDCLQKQGWIGSEPMCEDGKSSTFETYKLRAKAAVEEVSLHEFARVLFMLNKKRGYKSNRKANDKEEGKLFDGMTIAKKLYEEHLTPAEYSLQLLNTGRKFTPEYYRSDLIEEFEKIWNEQQKYYPEILTDEFKQQLEGKAKSNTSKLFLGKYGIYSADTKGLDRRLQPLKWRVEAMKQQVDKDVLAFVISDLKGQIANTSGLLGAISDRSKELYFSKQTIGQYLWASLQENPHISIKNQPFYRQDYLDEFEKIWETQATYHKELTSELKQEIRDIIIFYQRPLKSKKNLIAVCELEQRKVKVTVDGKEKEITIGPKIAPKSSPMFQEFRIWQNLNNILLLDHETNSKRPLYEEERNLLYEELSVKEKLSKTEALKVLGKKSKQWDLNYKELEGNRTQAVLYDCYNRIIVMSGHEECNFKKLKASDIRHYVKMIFKNLAFNTDILCFDSSLKGHELERQPMCQLWHLLYSYEGDNSRTGNDALLRKLETSFGFPKEYAAVLADVIFEDSYGNLSVKAMRNILPHLQAGKDYSQACEEAGYKHSRRSLTKEELNQKVYKEKLELLPKNSLHNPVVEKILNQMVNVINAVIEEYGKPDEIRIELARDLKIGAAERENMTRSINQGNAENKRIREILEKEFALSYLSRNDIIKYKLYEELKSNGFKTLYSDTYISKDKLFSKDFDIEHIIPKARLFDDSLSNKTIEARDVNIAKSNKTAFDFILERYGEQGVKTYKTKLLRLLEDGAISNKKYNNLLKTEADIPSGFIDRDLRNTQYIAKKAYEILSELVKIVTPTTGSVTNRLREDWQLVDVMKELNFEKYQKLGLADVIEDRDGRKVKRIKDWTKRNDHRHHAMDALTIAFTKPSYIQYLNNLNARSDKSSSIYGIEVKELHREEGKFRFNAPLPINEFRAEAKRHLKSVLVSIKAKKKVMTQNVNKIKTKHGIIKKVQLTPRGELHNATYYGTKKRPLVRMVKVGAALDEATIKRVCSPAIRAALLKRLNAYNGDAKEAFTGRNSIDKNPIYLDIEQTKLVPVLVKTIEWGMYHPIRKRITPDLKIDKVIDKGIREKLKARLAEFNGDAQKAFSNLDENPIYMDEAKRITLKRVSIEGVLSAIPLHTLKDKAGKPVIGSDGKPVFGDYVQTSNNHHIAFYIDDKGNLQDNPVSFFEAAERKSQGVPVIDRRYNCDKGWHFVFTMKQNEYFVFPNEATGFIPSEVDLLDEANYCIISPNLYRVQKLSKASGRDYWFRHHLETMLNDDLRLKNSTFKRIQSLKGLEDIVKVRINSIGKIVAVGKYD

SEQ ID NO: 619 - protein, 1483 aa, Prevotella sp.
MKTILGLDLGTNSIGWAKVSVDDYGNYLHDIKLGSRIIPMSQDVLGNFDSGVTVSQTAQRTEFRSKRRLVQRNLQRRERLHRVLHVLDFLPAHYDAAIGWDRTEAVTYGKFLNHAEPKLAWEELGNGKRRFLFMDSFHEMVADFARCQPALVADGKKIPLDWTIYYLRKKALTQAITKEELAWILLNFNQKRGYYQLRGEEEEENPTKQEEYYELKVVSVEATDSRKGNDTWYNVHLENGWIYRRSSKISLDDWVGKVKQFIVTTEYEKDGTTLKTDKEGNVKRSFRAPNENDWGLRKKRTETLLEMSGKTVGAFIYDHLLQEPADKIRGNFIRTIERHYYKAELEAILAEQCKYHIELRDKEMLEACARELYLNNLPHQRSLMKKDMTYLLLYDLIFYQRPLKSKKALIANCPYEYYEYVDKETGEIKRQNIKCIAKSNPYFQEFRLWQFVLNLRLFDRVEDKEVTANYLPTADDHARLFTYLNDRKEINQETLLKDYFKLKKVKIGNEKEYPIRWNYIEDKEKKYPCNETRYELLMALDRAGIEHKWLDDNNLEYRLWHLLYSVEVKSESETALRKLKNDDAFVNSFLKVKPFKKEYGAYSEKAIKRLLAVMRKGFLWNEQDICDETRKRIEIIIKGDVDEKVKERMGHAAYSFDRVSDFQGLPEWLACYVVYGRHSEAMDIQRWDSPERLMAYINNFKQYSLRNPIVEQCILETLRTVHDIWKETGQIDEIHVELGREMKSTSEERARRTQNVLRNENTNLRIKSLLIELKNDTDICNVHPYSPMQQEILRIYEEGALQELNREDEDFEEISKISQMSQPSGKELNRYKLWLEQKYRSPYTGKAISLAKLFTPAYQIEHVIPQSRYFDDSFTNKVICEAEVNTLKSNLLGYEFIKKHGGEIIHCTTLGDVRIFSESEYKAFVMDHYANNKSKKDKLLMEDIPQEFLSRQMNDSRYISKVVKTLLSNIVRMADESEATSKSVIVCTGGVTDRLKKDWGLNDVWNSIVYSRFERLNRLTGTEAFGHWENKDGKRVFQTSMPLELQRGFRKKRIDHRHHAMDALVIACASRNIVNYLNNESANNPKKREDLRRQLCDKNRVIRKPWETFTQDAYNALENVVVSFKNYVRVINKATNRYEHYDENGKKRFVQQKGSELWAIRKPMHKETYYGHVNLRRKELVTLQKALDDIPSICDKKLRDYISALVEKHFNKRQLLAHFKSTDYYWQKQYVNKVYVWTFSDDIKPLVATRKLLDTSFDAKRIGTITDTGIQKILRNYLEAKGGNATLAFTPEGIVEMNQNISKYNDGKPHQPILKVRITEPMGAKYRVGQTENKMAKYVEAQSGTNLYFAIYEDSEGKRSYTTVPLDEVAERLKQRLSPVPEKDENDVPLKFYLSPNDLVYVPTEEELQLRECKLNKDRIYKMVSSTGSECHFIPYYVANVIYNKVEFEAKNKIGRALTGEMIKAVCWKLEIDRLGNILKVIK

SEQ ID NO: 620 - protein, 593 aa, Prevotella sp.
MNTRILGLDTGTNSLAWAVVDRDAKGNYTLVRRGDVIFTEGVNVDGQPVPSKAAVKSKYKSLRVQYARRRLRKIDTLKVLVSLDLCPYLSDQQLSQWKAKKTYPLTDDFMLWQRSGSAEENNPYYCRYRCLTQKLDLTDQSQRFLLGRAFYHLAQRRGFLSNRLDTTSDSAESGKVKSGIAQLSVEMEKAGCTFLGEYFYQLYKQHGNTVRLRSRYTDREEHYIKEFLAICEKQELDAQWVEKLQRALYFQRPLKSQRKGVGKCTFEPKKPRCAESHPDYEAFRMLCILNNIKIKTPKDVSLRPLNAEEREKVWPLFFRKSKPNFDFEDIAKALAGKNNYAWYKDAGEKPFRFNYRMHQGVSGCPVTAQLIDIFGSDWKAGIAETYTAVGKKNGTKTIDEMADDVWNVLYSFSSKDKLKAFATDKLQLDEARATKFANAKLPHGFAALSLKAIRNILPFLRQGFIYAHAVLLAKIPDIVTAAVWDDADKREQILSGLLEVIENYNPDDRGIEGTIDFCIKSHLQDVVDLRPGAADALYHPSMIEAYPDAKLNKMGVFQLGSPRTNAIRNPMAMRSLHILRSVVNLLLRDGMLS

SEQ ID NO: 621 - protein, 1424 aa, Prevotella sp.
MTQKVLGLDLGTNSIGSAVRNLDLSDDLQWQLEFFSSDIFRSSVNKESNGREYSLAAQRSAHRRSRGLNEVRRRRLWATLNLLIKHGFCPMSSESLMRWCTYDKRKGLFREYPIDDKDFNAWILLDFNGDGRPDYSSPYQLRRELVTRQFDFEQPIERYKLGRALYHIAQHRGFKSSKGETLSQQETNSKPSSTDEIPDVAGAMKASEEKLSKGLSTYMKEHNLLTVGAAFAQLEDEGVRVRNNNDYRAIRSQFQHEIETIFKFQQGLSVESELYERLISEKKNVGTIFYKRPLRSQRGNVGKCTLERSKPRCAIGHPLFEKFRAWTLINNIKVRMSVDTLDEQLPMKLRLDLYNECFLAFVRTEFKFEDIRKYLEKRLGIHFSYNDKTINYKDSTSVAGCPITARFRKMLGEEWESFRVEGQKERQAHSKNNISFHRVSYSIEDIWHFCYDAEEPEAVLAFAQETLRLERKKAEELVRIWSAMPQGYAMLSQKAIRNINKILMLGLKYSDAVILAKVPELVDVSDEELLSIAKDYYLVEAQVNYDKRINSIVNGLIAKYKSVSEEYRFADHNYEYLLDESDEKDIIRQIENSLGARRWSLMDANEQTDILQKVRDRYQDFFRSHERKFVESPKLGESFENYLTKKFPMVEREQWKKLYHPSQITIYRPVSVGKDRSVLRLGNPDIGAIKNPTVLRVLNTLRRRVNQLLDDGVISPDETRVVVETARELNDANRKWALDTYNRIRHDENEKIKKILEEFYPKRDGISTDDIDKARYVIDQREVDYFTGSKTYNKDIKKYKFWLEQGGQCMYTGRTINLSNLFDPNAFDIEHTIPESLSFDSSDMNLTLCDAHYNRFIKKNHIPTDMPNYDKAITIDGKEYPAITSQLQRWVERVERLNRNVEYWKGQARRAQNKDRKDQCMREMHLWKMELEYWKKKLERFTVTEVTDGFKNSQLVDTRVITRHAVLYLKSIFPHVDVQRGDVTAKFRKILGIQSVDEKKDRSLHSHHAIDATTLTIIPVSAKRDRMLELFAKIEEINKMLSFSGSEDRTGLIQELEGLKNKLQMEVKVCRIGHNVSEIGTFINDNIIVNHHIKNQALTPVRRRLRKKGYIVGGVDNPRWQTGDALRGEIHKASYYGAITQFAKDDEGKVLMKEGRPQVNPTIKFVIRRELKYKKSAADSGFASWDDLGKAIVDKELFALMKGQFPAETSFKDACEQGIYMIKKGKNGMPDIKLHHIRHVRCEAPQSGLKIKEQTYKSEKEYKRYFYAAVGDLYAMCCYTNGKIREFRIYSLYDVSCHRKSDIEDIPEFITDKKGNRLMLDYKLRTGDMILLYKDNPAELYDLDNVNLSRRLYKINRFESQSNLVLMTHHLSTSKERGRSLGKTVDYQNLPESIRSSVKSLNFLIMGENRDFVIKNGKIIFNHR

SEQ ID NO: 622 - protein, 241 aa, Prevotella sp.
QAVKEKIKEAIAGKNFKTAIAEPIFMNKEKGIRINKVRYYVKAQERLKIRQQRDLSSKEYKQFFCVENESNYLLAIYEGELKGKKERDFCVVNNLDSAACLKRSNKGKAAPLVPERSEERNLPLLAVLKRGTQVLFYENSPEEILFDNPQDLVRRLYKVTGINTKKDVKNGKTYLYGNIELRFHQNAQKKDDVKMQSGVYKNNEVLRQGIVLSHKQFKALVEGVDFEFNVLGEIKKKERHA

SEQ ID NO: 623 - protein, 1216 aa, Prevotella stercorea
MTKILGIDTGTNSLGWAIVDKTADNYNLLDKGVNIFQEGVKIEKGIESSKAAERTEHRATRVRYYRIKLRKIRLLRILSDNHLCPPLSQEELSTWRLKKVYPKNELFMQWQRTDDDTEKTPYAYRHKCIHEKLDLSDVTDRYILGRAFYHIIQRRGFLSNRKEQGGEDSGKVKEGISTLTHEMNEAGYEYLGDYFYALYNKGEKIRKHYTARNEHFLSEFKAICEKQDLEKELGSEVVRNIEKAIFDQRPLKSQKGQVGKCVFEKNKTKCPSSHPMYEEFRMLTFINNIKIKTPNDDVLRPLNTGEREKIMPLFFRKSKKQFDFEDITKKLAPKKMYGFYKKEEDAEMPFLFNYPMDTSVSGCPVTAALKDVFGDDWITAICETYTLGEGKSRFDIVNDIWHALYFYSDKDKLAEFAINRLQLSEDEAKIFSEISLPADYASLSLKAICKILPYLRRGLIYSHAVFLGNLCEVMPKYEWSIKEMRETIIDNIIMEMDKCDTKDKRTFEVCIKDYLKGQYNVSDNSLKKLYHPSMIETYPRVQYTNEHGVYQLGSPRIDSVRNPMAMRSMFRLRKLVNRLLVEGKIDQNTEVHIEFARELNDANKRNAIALFVKENQSANDEARKQIITLFKKETGTDIEPTDKDILKYVLWEEQNHICLYTGKQIRISDFIGANPKFDIEHTIPRSVGGDSTKMNLTLCDSRFNREVKKTKLPVELPNHDEIMERIKEWKKNYELLDIQIRKNKKLSKGATTKEQKDTIIRKRHLLELRRDYWRGKYERFTMESVPEGFSRRQGTDISVISKYARLYLKSLFNRVYTVKGIATSDFRKIWGIQDIYSKKERINHVHHCIDAIVIACIGLDEYNKLGAYYHDEENNKWYGMSKASFKKPWATFVEDIKKIQDEILVYHYTPDNMPKQGRRRIKIDGKKILCKGDAARGSLHNDTYYGAIENDGAVKYVKRIDLASLEEKDVKNIVDDTVRSIIEAAIKEKGFKDAMASTIWMNEEKRVPIKKVRCFTPSITKPLNIRKQRDVSIKEYKQQYHVANDSNYLLALYIGTDNKGKEKREFEIVNILQAAQYYRTSNDKEVVDRHIVPIKSEHDYPFAYTLKIGTMVLLYEKSPNEVWDATIKERNRRLYKVTGLSTMRMKGRNGEYAYATVKLIHNEEARPSKDIKAKNGEYEQGEEFRPAIIMLHTQLNALVQGYDFEINELGEIRRLR

SEQ ID NO: 624 - protein, 1487 aa, Prevotella timonensis; identical to SEQ ID NO: 135

SEQ ID NO: 625 - protein, 770 aa, Pseudoramibacter alactolyticus
MAKGYFASDEEIDFSGVDDGFKNTLSSHQKFKEIFDVEVLNDWQKSMSEKIIFWATVYGDSKKFLKERLEDAYGNELDQKQIKRILGLRFKDWGRLSEAFLNLEGKNSKTNQSQTIIEALWNGDGTNNFNLMELLSSQFTYRDTLKKRALKGEKTLTNITYEDLSDLYLSPSVRRMVWQTILIVKELRQVLGAGPAKIFIEMARDVTLKAGTRTTSRRQQLLDLYKNVQTESRNWVEEIETQEESRFRSKKIFLYYTQMGQCMYTGEPIVFKDLFNRNLYDIDHIYPRHFVKDDSLINNLVLVKKQANSHKSDTFPIENSIQQARRDFWKWLSEKGLISREKFNRLTRRTSFSDEELAGFISRQIVETRQGTKAVAQIFENALPDSEVVYVKAGNVSDFRHHFNLLKCREINDLHHAQDAYLNVVVGNVYHTKFTKNPINFIKGYRKDRKAYAYHMDQIFDHPVKRNDIIAWQTDKNQSIATVKKVMAKGTPLVTRMSYEEHGELSNQNICSAKAAQKAEGKGYLPIKNSERLSNTQRYGGYNKYAGSYFFLVEHTLKKNRVRTIETMPLFLRDTIKTSKDLLKYCCESLKLEAPSIRVMKIKMGSLLSVNGAFVYLTGRSGKKLITPNGFQLILPQKWQDYIRLLIKTKDSPDDVEGISGGKNIEFYDILVEKHTKTCLKNRPNPIGEKLREWRNDFIALDNQKQSDILLEILKLTTFDNSGADLRAIGGKNQSGVSTIGKKISSQKSVVLVHRSVTGIFEKQVDLLSI

SEQ ID NO: 626 - protein, 103 aa, Rhizobium etli
MSGEQLTREIGRSGVKASAVGLGTWAIGGWMWGGTDEAQSIAAIQASLDAGVTLIDTAPAYGLGRSEEIVGKALAGRRDKAVIATKCGLVWHTQKGNHFFDQD

SEQ ID NO: 627 - protein, 1059 aa, Rhodovulum sp.
MGIRFAFDLGTNSIGWAVWRTGPGVFGEDTAASLDGSGVLIFKDGRNPKDGQSLATMRRVPRQSRKRRDRFVLRRRDLLAALRKAGLFPVDVEEGRRLAATDPYHLRAKALDESLTPHEMGRVIFHLNQRRGFRSNRKADRQDREKGKIAEGSKRLAETLAATNCRTLGEFLWSRHRGTPRTRSPTRIRMEGEGAKALYAFYPTREMVRAEFERLWTAQSRFAPDLLTPERHEEIAGILFRQRDLAPPKIGCCTFEPSERRLPRALPSVEARGIYERLAHLRITTGPVSDRGLTRPERDVLASALLAGKSLTFKAVRKTLKILPHALVNFEEAGEKGLDGALTAKLLSKPDHYGAAWHGLSFAEKDTFVGKLLDEADEERLIRRLVTENRLSEDAARRCASIPLADGYGRLGRTANTEILAALVEETDETGTVVTYAEAVRRAGERTGRNWHHSDERDGVILDRLPYYGEILQRHVVPGSGEPEEKNEAARWGRLANPTVHIGLNQLRKVVNRLIAAHGRPDQIVVELARELKLNREQKERLDRENRKNREENERRTAILAEHGQRDTAENKIRLRLFEEQARANAGIALCPYTGRAIGIAELFTSEVEIDHILPVSLTLDDSLANRVLCRREANREKRRQTPFQAFGATPAWNDIVARAAKLPPNKRWRFDPAALERFEREGGFLGRQLNETKYLSRLAKIYLGKICDPDRVYVTPGTLTGLLRARWGLNSILSDSNFKNRSDHRHHAVDAVVIGVLTRGMIQRIAHDAARAEDQDLDRVFRDVPVPFEDFRDHVRERVSTITVAVKPEHGKGGALHEDTSYGLVPDTDPNAALGNLVVRKPIRSLTAGEVDRVRDRALRARLGALAAPFRDESGRVRDAKGLAQALEAFGAENGIRRVRILKPDASVVTIADRRTGVPYRAVAPGENHHVDIVQMRDGSWRGFAASVFEVNRPGWRPEWEVKKLGGKLVMRLHKGDMVELSDKDGQRRVKVVQQIEISANRVRLSPHNDGGKLQDRHADADDPFRWDLATIPLLKDRGCVAVRVDPIGVVTLRRSNV

SEQ ID NO: 628 - protein, 1405 aa, Riemerella anatipestifer
MKTILGLDLGTNSIGWALVKEAENSNEKSEIIKLGVRVNPLTVDEKTNFEAGRPLSTNADRTAKRSARRNLQRYKLRRKNLIDLLIKNQLIDKDTPLTEIGKNTTHQTLELRAKAARERIELEDLARVFLAINKKRGYRSSRKVNNEEEGQAVDGMAVAKKLYDENLTPGQYAYELLSKGKKYVPDFYRSDLQAEFNAIWEYQKQFYADILDDELYNALKGQGQQNSRKRFLAIKGVYTAENKGKRDDVKLRHYKWRSEAISKKINIEEVAYVLVEINNDLNKSSGYLGAISDRSKELYFNKETVGENLWKQIQKNPHTSLKNQVFYRQDYLDEFEQIWETQAQFHPQLTLALKEQIRDVIIFYQRKLKSQKGLLSFCQFESWEIERKDENGNVILNKTTQLPKRQTVGRRVAPKSSPLFQEFKIWQNINNLEVTKISEGASKNKKETETLSDDERKLLFEELNLRGNLSQKEVLQILGLKDKEYKTNFSEGLEGNRTNAALFNIYQQIAENEGYGFDWSKKSAQEIKEELKAVFPQIGIQADILDFNANLDGKEFENQASYQLWHLLYSAEEDDKINEEDQIIYGNSAVSLKKKLCEKFGFTPEYAKWIANVSLQDDYGNLSTKAMRKIIPYLIDGNDYSEACALAGYNHSNSLTKEENDNRELLDKLELLPKNSLRNPVVEKILNQMVNVVNQVIETYGKPDEVRIELARELKKSAEKRAEMTKSINEATRRNEDIKKLITKDFGIPNPTKSDVVRYRLWEELAPLAYKDVFTGKQIKKEDLFSSKIDIEHIIPKALLFDDSFSNKTLVFRETNLKKADRTAYDFIESDYNATLDDYIQRVETLYNNTKGTISKGKRNKLLMAQKNLPDGFIERDLRNSQYIAKKAKAMLYQVFKDVNVTSGSITDRLREDWDLINVMKELNFPKYKALGLTEIEERYDIGQEKTKRVEVITDWTKRNDHRHHAMNALTVAFTTSSHIQYLNYLNARKNESHKEHKNIKGIENKITHKQKDKRKFIPPMPNFREEAKKHIETILVSIKNKNKVYTKNINKTKKKSGHNTKEQLTPRGQLHKETVYGKSKRPMSKPTKINKNFSLEQAQLIINVQEKELVLRHLAQFDNNPAVAFDTKTLKKMPLLKNGEPLKEVLCFEEIFTIRKDITPDLKIEKVVDEKIKAILEQRKKDFGGNAKEAFSDLDKNPIWLNKKKGICIKRVTITGVSNAEALHHQKDHLGREILDDNGNPIPADFVSTGNNHHLAVYLDSEGKLQDNIVSFYEAVVRTSQGLPVVDKGLNKDLGWKFLFSLKQNEMFVFPNDDFDINDFDLLDDKKAELISKHLYRVQKISKVSAGNSFVRDIVFRHHLETTVKEVKELKDISYIQLKSLEGLRNIKKVRINHIGKIVQVGEY

SEQ ID NO: 629 - protein, 1145 aa, Riemerella anatipestifer
MKTILGLDLGTNSIGWALVKETENSNEKSEIIKLGVRVNPLTVDEKTNFEAGRPLSTNADRTAKRSARRNLQRYKLRRKNLIDLLIKHRLIDKDTPLTEIGKNTTHQTLELRAKAARERIELEDLARVFLAINKKRGYRSSRKVNNEEEGQVVDGMAVAKKLYDENLTPGQYAYELLSKGKKYVPDFYRSDLQAEFDSIWEYQKQFYADILDDELYNALKGQGQQNSRKRFLAIKGVYTAENKGKRDEVKLQHYKWRSEAITQKLSIEEVAYVLVEINNDLNKSSGYLGAISDRSKELYFNKETVGENLWKQIQKNPHTSLKNQVFYRQDYLDEFEQIWETQAQFHPQLTLALKEQIRDVVIFYQRKLKSQKGLLSFCQFESWEIERKDENGNVILNKTTQLPKRQTVGRRVAPKSSPLFQEFKIWQNINNLEIAKISDGNSKNKKETEALSDDERKLLFEELNLRGNLSQKEVLQILGLKDKEYKTNFPEGLEGNRTNAALFNIYQQIAENEGYGDWTKKSAQEIKEELKAVFPQIGIQADILDFNAELDGKEFENQASYQLWHLLYSAEEDDKINEEDQIIYGNSAVSLKKKLCEKFGFTPEYAKWIANVSLQDDYGNLSTKAMRKIIPYLIDGNDYSEACALAGYNHSNSLTKEENDNRERLNKLELLPKNSLRNPVVEKILNQMVNVVNQVIETYGKPDEVRIELARELKKSAEERAEMTKGINEATRRNEDIKKLITKNFGIPNPTKNDVVRYRLWEELAPLAYKDVFTGRQIKKEDLFSSKIDIEHIIPKALLFDDSFSNKTLAFRETNLKKADRTAYGFIESDYNATLDDYIQRVETLYNNAKGTISKGKRNKLLMAQKNLPDGFIERDLRNSQYIAKKAKSMIEKVFNDVNVTSGSITDRLREDWDLINVMKELNFPKYKALGLTEIEERYDIGQEKTKKVEVITDWTKRNDHRHHAMDALTVAFTTKSHVQYLNNLNTIHSLKGDEVDLELSKLYGLKNTITEVVNKKRKFIPPMPNFREEAKKHIETILVSIKNKNKVYTKNINKTKKESGYHTKEQLTPRGQLHKETVYGKSKRPMNKPTKINKNFSLEQAQLIINVQEKELVLRHLAQFDNNPAVAFDTKTLKKCHYLKMVNL

SEQ ID NO: 630 - protein, 1400 aa, Riemerella anatipestifer
MKTILGLDLGTNSIGWALVKETENSNEKSEIIKLGVRVNPLTVDEKTNFEAGRPLSTNADRTAKRSARRNLQRYKLRRKNLIDLLIKHRLIDKDTPLTEIGKNTTHQTLELRAKAARERIELEDLARVFLAINKKRGYRSSRKVNNEEEGQVVDGMAVAKKLYDENLTPGQYAYELLSKGKKYVPDFYRSDLQAEFDSIWEYQKQFYADILDDELYNALKGQGQQNSRKRFLAIKGVYTAENKGKRDEVKLQHYKWRSEAITQKLSIEEVAYVLVEINNDLNKSSGYLGAISDRSKELYFNKETVGENLWKQIQKNPHTSLKNQVFYRQDYLDEFEQIWETQAQFHPQLTLALKEQIRDVVIFYQRKLKSQKGLLSFCQFESWEIERKDENGNVILNKTTQLPKRQTVGRRVAPKSSPLFQEFKIWQNINNLEIAKISDGNSKNKKETEALSDDERKLLFEELNLRGNLSQKEVLQILGLKDKEYKTNFPEGLEGNRTNAALFNIYQQIAENEGYGDWTKKSAQEIKEELKAVFPQIGIQADILDFNAELDGKEFENQASYQLWHLLYSAEEDDKINEEDQIIYGNSAVSLKKKLCEKFGFTPEYAKWIANVSLQDDYGNLSTKAMRKIIPYLIDGNDYSEACALAGYNHSNSLTKEENDNRERLNKLELLPKNSLRNPVVEKILNQMVNVVNQVIETYGKPDEVRIELARELKKSAEERAEMTKGINEATRRNEDIKKLITKNFGIPNPTKNDVVRYRLWEELAPLAYKDVFTGRQIKKEDLFSSKIDIEHIIPKALLFDDSFSNKTLAFRETNLKKADRTAYGFIESDYNATLDDYIQRVETLYNNAKGTISKGKRNKLLMAQKNLPDGFIERDLRNSQYIAKKAKSMIEKVFNDVNVTSGSITDRLREDWDLINVMKELNFPKYKALGLTEIEERYDIGQEKTKKVEVITDWTKRNDHRHHAMDALTVAFTTKSHVQYLNNLNTIHSLKGDEVDLELSKLYGLKNTITEVVNKKRKFIPPMPNFREEAKKHIETILVSIKNKNKVYTKNINKTKKESGYHTKEQLTPRGQLHKETVYGKSKRPMNKPTKINKNFSLEQAQLIINVQEKELVLRHLAQFDNNPAVAFDTKTLKKMPLLKNGEPLKEVLCFEEIFTIRKDITPDLKIEKVVDEKIKAILEQRKKDFGGNAKEAFSDLDKNPIWLNKEKGICIKRVTITGVSNAEALHHQKDHLGREILDDNGNPIPADFVSTGNNHHVAIYEDEKGKLQEKVVSLYEAVARANQGLPVVDKGLNEDLGWKFLFTMKQNEMFVFPNDDFDVNDIDLLDENNAKIISQHLFRVQKLATKNYMFRHHLETNVQEVKELNDIAYKSIRSTEPLKNIKKVRINHIGKIVQVGEY

SEQ ID NO: 631 - protein, 1128 aa, Roseburia intestinalis
MDEKMDYRIGLDIGIASVGWAVLQNNSDDEPVRIVDLGVRIFDTAEIPKTGESLAGPRRAARTTRRRLRRRKHRLDRIKWLFENQGLINIDDFLKRYNMAGLPDVYQLRYEALDRKLTDEELAQVLLHIAKHRGFRSTRKAETAAKENGAVLKATDENQKRMQEKGYRTVGEMIYLDEAFRIGCSWSEKGYILTPRNKAENYQHTMLRAMLVEEVKEIFSSQRRLGNKKATEELEEKYLEIMTSQRSFDLGPGMQPDGKPSPYAMEGFSDRVGKCTFLGDQGELRGAKGTYTAEYFVALQKINHTKLVNQDGETRNFTEEERRALTLLLFTQKEVKYAAVRKKLGLPEDILFYNLNYKKAATKEEQQKENQNTEKAKFIGMPYYHDYKKCLEERVKYLTENEVRDLFDEIGMILTCYKNDDSRTERLAKLGLVPIEMEGLLAYTPTKFQHLSMKAMRNIIPFLEKGMTYDKACEEAGYDFKADSKGTKQKLLTGENVNQTINEITNPVVKRSVSQTVKVINAIIRTYGSPQAINIELAREMSKTFEERRKIKGDMEKRQKNNEDVKKQIQELGKLSPTGQDILKYRLWQEQQGICMYSGKTIPLEELFKPGYDIDHILPYSITFDDSFRNKVLVTSQENRQKGNRTPYEYMGNDEQRWNEFETRVKTTIRDYKKQQKLLKKHFSEEERSEFKERNLTDTKYITTVIYNMIRQNLEMAPLNRPEKKKQVRAVNGAITAYLRKRWGLPQKNRETDTHHAMDAVVIACCTDGMIQKISRYTKVRERCYSKGTEFVDAETGEIFRPEDYSRAEWDEIFGVHIPKPWETFRAELDVRMGDDPKGFLDTHSDVALELDYPEYIYENLRPIFVSRMPNHKVTGAAHADTIRSPRHFKDEGIVLTKTALTDLKLDKDGEIDGYYNPQSDLLLYEALKKQLLLYGNDAKKAFAQDFHKPKADGTEGPVVRKVKIQKKQTMGVFVDSGNGIAENGGMVRIDVFRVNGKYYFVPVYTADVVKKVLPNRASTANKPYSEWRTMEDKDFLFSLYSRDLVHIKSKKGIPIKNVDGSLGESKEVYAYYIGADISGAKIEGKAHDSRYTFRGIGVQKLELIEKCQVDILGHISTVKNEKRMGFS

SEQ ID NO: 632 - protein, 1471 aa, Scardovia wiggsiae
MGYKAPRNDKGEIDYGVGLDLGNGSVGWVAMDKDYHLIRARGHELIGARLFDPANSAENRRESRTTRRRLSRRRWRLRMLDSLFASELAKIDPNFLARRKYSWVHPKDEQNHENWYGSIIFGSKEQDKQFYKDYPTIYHLRKKLTEDTERHDIREIYVAIHHIVKYRGHFLREGEINSENLFDPEGFVELIKDVIKLNNSYDESTPIFEASPADVSEALLNEHTSRSGRIEDTLDKLDFSVSRVDKHELKGMRDAAKAVIGAIVGNTADFSKIFNLDNLDKDSKDNLKLKFADSNFDEKYGGVVGSGLLDETQIELVDRIHAVYDAVALKGILGDAHTISEAKVESYEKHRKNWKLIKEELRTKENKDEVDLWYGDLSGRQYKNPPDPEKGPDEGSKKDSPIRDSDQKQNLIKKANDYFTELIDDSQLSEEQKNCLKNDINNGQLFPVQRSSDNGVIPYQIHLNELRRIIENQKQYYPFLAETFIRKTAEGKSYEENKIVALLKFRVPYYVGPLVSKEDMEEHSSGNSAYHWMARNPGRGEAITPWNFDEVVDKDESGARFISRLTGTDTYLLGEPTLPQHSLLYEEYMVLSELNNVRLNVRQGNHWSDKNRQRLSYKQKEFLIENLFKEHKTVTRKRAEDCLSSMGCGEVQLFGLSDEKKFASSLSSYITLKKILGKAFVDDSGNSAILERIIEVQTVFEDREPLTHQLSLIDSLTVEQRKQLAKIHYTGWGKLSRKLLTSKKGSYKIHSQNEIMRTQHSIIDIMRGDSLNLIEIIRDKKIGIGEWIDNENLDRETGESDVSRLESVFEGIVMSPRVKRGVVQAVRVIDDLAKAIGNPPQRIFIEMADEVQASQRTVSRLSRLKALYGSPSLQKEFNDLKDLRKSLNETKDADLQEDRLYLYYIQLGKDLYTGKEISIDSLSSAYDIDHIVPQALTQDDSIDNRVLVSRKENARKTDSYLYTPDLIKNMRPLWGKLLAAGLMSQKKYDALTRVDDFKDREKQRFVQRSLVETRQIMKNVSTILRTYYGEDTNVVTLKSSITHDMRKYLGFPYKNRDINDYHHAQDALCISAAGQFMLNRHFVSGGEVTDGASNAYNMYLAEYLQEFRDAKARGERKRSTAFGFVVGSMSSKDDEKRTDHRTGEIVWSETNAEYLRKVMNYKKMLITQKVGDVKTRALYDETRYGHKESSAKSIKFDNLRRDTSLYGGFSGASTAYMMLVEYKKKNKLVSITAQEASLLAVADQKNDTVSVMDGILASHGLSGAKILLPKIVTGQLLDYSDALVTLQSASELNTARQMWLPRNDYNDIDIILKSKDIEDAAHKLGYDSDTVHVLRRIQKLFEAVFRVAESQFPLHQLSKDQQEEILRDPQNYGFGSAVKLLGGLLKALHANAENTNLAGLVKVLHGDKEYSDDGKAKEFKKFGFSPRWRRISNPTGFTLSDSDTFIYQSPSGIFEQRVTVKELKEKADKQK

SEQ ID NO: 633 - protein, 116 aa, Sphingobacterium spiritivorum
MFRKYFEEKNSARLLFTLKQGDFVYVPDDNEEVILDESSPLFIDYWKNISERSNNIHVVQKFSGKEIYFLKHTIADTIAKKIEFGSQDCYQSLNGKSIKEFCIKIDSDRLGNISKV

SEQ ID NO: 634 - protein, 1306 aa, Sphingobacterium spiritivorum; identical to SEQ ID NO: 98

SEQ ID NO: 635 - protein, 1110 aa, Sphingobium sp.
MAEGKKRIWRLGADLGANSLGWAAIELSAPVNGKPIAILAAGSRIFSDGRDPKSGASLAVDRRDARAMRRRRDRFKQRQKALIKYLIADGLFPADEAARNAMAAIDPYAVRARALDEALSLPELGRALFHLNQRRGFKSNRKADRKADDDAGKIAIGIDRTRDAIAEDEADAGAEPGSWTFGKWLHERRLKGQSVRTRLRPESGEDAKGDGYDFYPDRALMEEEFDAIWAAQAPHHPDVLTNDVHDRLHEIIFYQRPLKAPQVGMCSLIPGDRRLPKAHPLFQRRRLLEELNALMIVRPGEVAQRLTREERDILLLKLKDKNKVSFATLRKALKLDPDARFNKESEDRTDLKGDEVAAVMGSKTRFGNLWVHLSIEAQWDVLARLDAVESDAEDAAFCAWLVETYALTPEQARAVANAPLPPGYGRFGETATRKLIEALRDGKKDDRVLVYSEAVTEAGLGHHSDRRTGEVFEDAKGRPQLPYYGVALERHIMPGTGDPSDPEEMRVGRLTNPTVHIGLNQLRRILNVLIRAYGPPAEIAIELARELKLTDEDKKRINRENNDNRIAAERRSEKLLAIGQADSGANRALLKLWEELNPANVLDRRCIYSGRQISIDMLFSAAVEVDHILPFAATLDDSNGNKIVCLREANREKRKRSPHDAWGHSARWDEIAARAAQLPRNKRWRFEPDAMDKFRDEGGFQARHLVDTQYLARLSREYLATLYPEKGEGSGHIWVSPGRLTEMVRRKLGLNDLLPDHNFGGGADQAKNRLDHRHHAIDAVVVAIVDRGMLNAIARASGQEGAEGRERIIIPEPWDGFRDALRETVNRITVSHRTDHGTASKAGLPKGKDATAGRLHNDTAYGFTGDTDAKGNSIVVRRVPLSSFKKLADLDRIRDADLKAALYQHLNGLEGKAFEKALAEFHKLEWHNFGGVRRVRVTEPLTVIPIKDRNGRIYKGYKGDSNYRYDVWELPDGKWVTNWKNEAGEAMSSVISMFDAHQSSEPPRPHPAARKILSLHQNDLLAIEREGEDRKLMRVVKFGQSGQITLAEHQQAGDLKKRDAVSNDDDPFKYFAPTSGGLKKVKARQVRIDEIGRVLDPGFPARTARRKTRG

SEQ ID NO: 636 - protein, 1084 aa, Sporolactobacillus vineae
MKYSIGLDIGISSVGWSVINLDRERIELMGARLFDAAENPKNGSSLAAPRRDARSARRRLRRRRYRVGRVRHFIIDRGLVTRGQADQLFDWKDGDLDIWLVRVNALERLLTDREFARVLIHIAKNRGYRSNRKSEAKSGENGQVLSAIKANKELMEEKGYQTVAEMLVNEPETFAGRKRNRGGEYTHVIARSELEHEIRLIFTKQRAFGNRFATEENENTYVKIWAAQRPVATKDDILKKIGDCTFEKGEKRAPKASYAFQYFRALDKLNRLRILSVREPSRNLTDDERNLIVPALFNHDKQKYSDLRKILQLRDDQKFNELFYDPGKSLKENENKTFLSLAEQYKIRKVIRDVQGKDGLLQYRPLDIDTIAYALTVFKDDQDTRDYLSNTFVNGNGKQVLNLANRAFDAELIDGLLSLSFAKFGHLSLKALHKLIPHMEQGLSYYDACKKVGYHDNEQVGKSKQHLLPVIPADEIRNPVVVRSLSQTRKVINAIIKRYGSPTFMYIELAREMGRPYNERRDLEKQYNKNRTVNDSAIEQIHELYPEIGAPRGHDILKYKLWQQQDCKCAYSLEKIPAEKIFEPGYAEVDHIIPYSRSFDDSNSNKVLVLSRMNQEKKNRTPYEWFGGDEHRWNKFESYVNALKVNRKKKSLLTKKNMDTEEEDTFKSRHLNDTRYITRFIKSFVEDNLLFREIEGAKQHVFTVNGAYTSLMRKRWGFNKNREESDLHHSVDAVIIAVSQPFRNEVSRYFKHREISLPQLLKRTWDYFPEPWEGFVKELRARTLQDPEKLKLALESLDLDSYDPEFIDEVKPIFISRMPKRSIKGQIHDETLRRNRGKTKDGFVKIVTRTRLENIKFDKNGDFPMYGRESDPKTYQAIKQRYLENNKDKKKAFIEPLYKPAKNPNNASLIRSVKIEDKANQIVPLRDEAVAYNASIVRTEVYRNKETGKFYLAPVYVSDVFAGREPRRFIRANVPYEQWVNITDKFTFLFNLYPNDVIYIKMKKVKTTKSNINKTISWQESYFYFKGTDIHTGAITIIDHMNSFTDRVGTQGLQLFEKYQVDPLGNLSRVHGETQYGVPALSHS

SEQ ID NO: 637 - protein, 475 aa, Staphylococcus massiliensis
MGQDYILGLDIGITSVGYGLIDYHDKSVIDAGVRLFKEANVENNEGRRSKRGSRRLQRRRKHRLARTRNLLESYQLNPFPKCEKNPYEIRVKGFKEVLTSDELSAALLHLAKRRGIDNVHVTDTESDSSDNGLSTKEQLAKNQKALESRYVCELQLERLLNDNKVRGANNRFKTQDFVREAKQILSIQKDHHNLDQVFIDKYISLLETRREYYEGPGKGSPYGWDGDIKKWYELLMGRCTYFPESLRSVKYAYSADLFNALNDLNNLVIVRDENDKLTYPEKYHIVENVFKQRKKPTLKQIAKEIDVAPEDIRGYRVTASGTPVFTSFKLYHDIKSVTSNDKVLEDTELLDAIAEVLTIYQSPIEVQEKLESLNVILTKEEIEGISKLTGYTGTHALSLKAIQIVIDELWETNDNQMTIFTRLNMKPQKVDLAKANKIPTSLVEDFIISPVAKRAFIQSIKVINAVIKNMVCLKI

SEQ ID NO: 638 - protein, 581 aa, Staphylococcus massiliensis
MPKDIIIELAREKNSDEERKIIRDVQKRNQQTRDLVDKVIKETGKTKAKGMVEKLILHDKQEGKCLYSLKSIPLEDLLNNPHHYEVDHIIPRSVSYDNSMNNKVLVLQEENSKKSNQTPFQYFNSSNTHITFKQFKQHVLNLSKTKDRITKKKKEYLLEERDINKFSVQKEFINRNLVDTRYATRELMTLLRAYFSANELDVKVKAINGGFTSYLRKRWDFKKDRNAGYKHHAEDALIIANVDFIFKQLKALDNAKKVMEGRKVQVEKDNVEDNEHYESLFREPDQIKEIKLYDNYKFSHRVDKKPNRELINDTIYSTRKVDNKTYTIQTVNNIYDKQNDQLKKLFNKSPEKFLMYKHDPKTFDKLATIMRQYKNEKNPLYKFHDETGEYLTKYAKKDNGPIVKSLKYIGKQVNAHLDITNDYENSNNKVVKLSLKPFRFDVYLDDGKYKFVTVKYLDIIKKDTYYVIDEEKYKLALQQKKISENAKFIGSFYNNDLIKINGELLRVIGVNDDAKNTLELNMIDISYRDYVENMNLATTPRIRKNIGKSITILEKYTTDILGNTFKISSPEKPQFIFKVRD

SEQ ID NO: 639 - protein, 1334 aa, Staphylococcus pseudintermedius; identical to SEQ ID NO: 205

SEQ ID NO: 640 - protein, 1112 aa, Staphylococcus simulans; identical to SEQ ID NO: 252

SEQ ID NO: 641 - protein, 773 aa, Streptococcus agalactiae
MNKPYSIGLDIGTNSVGWSIITDDYKVPAKKMRVLGNTDKEYIKKNLIGALLFDGGNTAADRRLKRTARRRYTRRRNRILYLQEIFAEEMSKVDDSFFHRLEDSFLVEEDKRGSKYPIFATLQEEKDYHEKFSTIYHLRKELADKKEKADLRLIYIALAHIIKFRGHFLIEDDSFDVRNTDISKQYQDFLEIFNTTFENNDLLSQNVDVEAILTDKISKSAKKDRILAQYPNQKSTGIFAEFLKLIVGNQADFKKYFNLEDKTPLQFAKDSYDEDLENLLGQIGDEFADLFSAAKKLYDSVLLSGILTVIDLSTKAPLSASMIQRYDEHREDLKQLKQFVKASLPEKYQEIFADSSKDGYAGYIEGKTNQEAFYKYLSKLLTKQEDSENFLEKIKNEDFLRKQRTFDNGSIPHQVHLTELKAIIRRQSEYYPFLKENQDRIEKILTFRIPYYIGPLAREKSDFAWMTRKTDDSIRPWNFEDLVDKEKSAEAFIHRMTNNDFYLPEEKVLPKHSLIYEKFTVYNELTKVRYKNEQGETYFFDSNIKQEIFDGVFKEHRKVSKKKLLDFLAKEYEEFRIVDVIGLDKENKAFNASLGTYHDLEKILDKDFLDNPDNESILEDIVQTLTLFEDREMIKKRLENYKDLFTESQLKKLYRRHYTGWGRLSAKLINGIRDKESQKTILDYLIDDGRSNRNFMQLINDDGLSFKSIISKAQAGSHSDNLKEVVGELAGSPAIKKGILQSLKIVDELVKVMGYEPEQIVVEMARENQTTNQ

SEQ ID NO: 642 - protein, 1370 aa, Streptococcus agalactiae
MNKPYSIGLDIGTNSVGWSIITDDYKVPAKKMRVLGNTDKEYIKKNLIGALLFDGGNTAADRRLKRTARRRYTRRRNRILYLQEIFAEEMSKVDDSFFHRLEDSFLVEEDKRGSKYPIFATMQEEKDYHEKFPTIYHLRKELADKKEKADLRLVYLALAHIIKFRGHFLIEDDRFDVRNTDIQKQYQAFLEIFDTSFENNHLLSQNVDVEAILTDKISKSAKKDRILAQYPNQKSTGIFAEFLKLIVGNQADFKKHFNLEDKTPLQFAKDSYDEDLENLLGQIGDEFADLFSAAKKLYDSVLLSGILTVTDLSTKAPLSASMIQRYDEHREDLKQLKQFVKASLPEKYQEIFADSSKDGYAGYIEGKTNQEAFYKYLSKLLTKQEDSEYFLEKIKNEDFLRKQRTFDNGSIPHQVHLTELKAIIRRQSEYYPFLKENQDKIEKILTFRIPYYVGPLARGNSDFAWMTRKTDDSIRPWNFEDLVDKEKSAEAFIHRMTNNDLYLPEEKVLPKHSLIYEKFTVYNELTKVRYKNEQGETYFFDSNVKQEIFDGVFKEHRKVSKKQLLDFLAKEFEEFRIVDVTGLDKENKAFNASLGTYHDLKKILDKDFLDNPDNESILEDIVQTITLFEDREMIKKRLENYKDLFTESQLKKLYRRHYTGWGRLSAKLINGIRDRESQKTILDYLISDGRANRNFMQLINDDGLSFKSIISKAQSGSHSDNLKEVVGELAGSPAIKKGILQSLKIVDELVKVMGYEPEQIVVEMARENQTTNQGRRNSRQRYKLLEDGVKNLASDLNGDILKEYPTDNQALQNERLFLYYLQNGRDMYTGEALDIDNLSQYDIDHIVPQAFIKDDSIDNRVLVSSAKNRGKSDDVPSIDIVKARKAFWKKLLDAKLISQRKYDNLTKAERGGLTPDDKAGFIQRQLVETRQITKHVARILDERFNNKVDDNNKPIRKVKIVTLKSNLVSNFRKEFGFYKIREVNNYHHAHDAYLNAVVAKAILTKYPQLEPEFVYGDYPKYNSYKTRKSATEKLFFYSNIMNFFKTKVTLADETVVVKDDIEVNNETGEIAWDKKKHFATVRKVLSYPQVNIVKKTEVQTGGFSKESILAHSNSDKLIPRKTKDIYLDPKKYGGFDSPIVAYSVLVLADIKKGKAQKLKTVKELIGITIMERERFEKNPSAFLESKGYLNIRTDKLIILPKYSLFELENGRRRLLASAGELQKGNELALPTQYMKFLYLASRYNESKGKPEEIEKKQEFVNQHVSYFDDILQLINDFSKRVILADANLEKINKLYSDNKDNTPVDELAKNIINLFTFTSLGAPAAFKFFDKSVDRKRYTSTKEVLDSTLIHQSITGLYETRIDLGKLGED

SEQ ID NO: 643 - protein, 1370 aa, Streptococcus agalactiae
MNKPYSIGLDIGTNSVGWSIITDDYKVPAKKMRVLGNTDKEYIKKNLIGALLFDGGNTAADRRLKRTARRRYTRRRNRILYLQEIFAEEMSKVDDSFFHRLEDSFLVEEDKRGSKYPIFATMQEEKDYHEKFPTIYHLRKELADKKEKADLRLVYLALAHIIKFRGHFLIEDDRFDVRNTDIQKQYQAFLEIFDTSFENNHLLSQNVDVEAILTDKISKSAKKDRILAQYPNQKSTGIFAEFLKLIVGNQADFKKHFNLEDKTPLQFAKDSYDEDLENLLGQIGDEFADLFSAAKKLYDSVLLSGILTVTDLSTKAPLSAYMIQRYDEHREDLKQLKQFVKASLPEKYQEIFADSSKDGYAGYIEGKTNQEAFYKYLSKLLTKQEDSEYFLEKIKNEDFLRKQRTFDNGSIPHQVHLTELKAIIRRQSEYYPFLKENQDKIEKILTFRIPYYVGPLARGNSDFAWMTRKTDDSIRPWNFEDLVDKEKSAEAFIHRMTNNDLYLPEEKVLPKHSLIYEKFTVYNELTKVRYKNEQGETYFFDSNVKQEIFDGVFKEHRKVSKKQLLDFLAKEFEEFRIVDVTGLDKENKAFNASLGTYHDLKKILDKDFLDNPDNESILEDIVQTITLFEDREMIKKRLENYKDLFTESQLKKLYRRHYTGWGRLSAKLINGIRDRESQKTILDYLISDGRANRNFMQLINDDGLSFKSIISKAQSGSHSDNLKEVVGELAGSPAIKKGILQSLKIVDELVKVMGYEPEQIVVEMARENQTTNQGRRNSRQRYKLLEDGVKNLASDLNGDILKEYPTDNQALQNERLFLYYLQNGRDMYTGEALDIDNLSQYDIDHIVPQAFIKDDSIDNRVLVSSAKNRGKSDDVPSIDIVKARKAFWKKLLDAKLISQRKYDNLTKAERGGLTPDDKAGFIQRQLVETRQITKHVARILDERFNNKVDDNNKPIRKVKIVTLKSNLVSNFRKEFGFYKIREVNNYHHAHDAYLNAVVAKAILTKYPQLEPEFVYGDYPKYNSYKTRKSATEKLFFYSNIMNFFKTKVTLADETVVVKDDIEVNNETGEIAWDKKKHFATVRKVLSYPQVNIVKKTEVQTGGFSKESILAHSNSDKLIPRKTKDIYLDPKKYGGFDSPIVAYSVLVLADIKKGKAQKLKTVKELIGITIMERERFEKNPSAFLESKGYLNIRTDKLIILPKYSLFELENGRRRLLASAGELQKGNELALPTQYMKFLYLASRYNESKGKPEEIEKKQEFVNQHISYFDDILQLINDFSKRVILADANLEKINKLYSDNKDNTPVDELAKNIINLFTFTSLGAPAAFKFFDKSVDRKRYTSTKEVLDSTLIHQSITGLYETRIDLGKLGED

SEQ ID NO: 644 - protein, 1378 aa, Streptococcus agalactiae
MNKPYSIGLDIGTNSVGWSIITDDYKVPAKKMRVLGNTDKEYIKKNLIGALLFDGGNTAADRRLKRTARRRYTRRRNRILYLQEIFAEEMSKVDDSFFHRLEDSFLVEEDKRGSKYPIFATMQEEKYYHEKFPTIYHLRKELADKKEKADLRLIYLALAHIIKFRGHFLIEDDRFDVRNTDIQKQYQAFLEIFDTTFENNDLLSQNVDVEAILTDKISKSAKKDRILARYPNQKSTGIFAEFLKLIVGNQADFKKHFNLEDKTPLQFAKDSYDEDLENLLGQIGDEFADLFSAAKKLYDSVLLSGILTVIDLSTKAPLSASMIQRYDEHHEDLKHLKQFVKASLPENYREVFADSSKDGYAGYIEGKTSQEAFYKYLLKLLTKQEGSEYLLEKIKNEDFLRKQRTFDNGSIPHQVHLTELRAIIRRQSEYYPFLKENLDRIEKILTFRIPYYVGPLAREKSDFAWMTRKTDDSIRPWNFEDLVDKEKSAEAFIHRMTNNDLYLPEEKVLPKHSLIYEKFTVYNELTKVRFLAEGFKDFQFLNRKQKETIFNSLFKEKRKVTEKDIISFLNKVDGYEGIAIKGIEKQFNASLSTYHDLKKILGKDFLDNTDNELILEDIIQTLTLFEDREMIKKRLDIYKDFFTESQLKKLYRRHYTGWGRLSAKLINGIRNKENQKTILDYLIDDGSANRNFMQLIKDAGLSFKPIIDKARTGSHSDNLKEVVGELAGSPAIKKGILQSLKIVDELVKVMGYEPEQIVVEMARENQTTAKGLSRSRQRLTTLRESLGNLKSNILEEKKPKYVKDQVENHHLSDDRLFLYYLQNGKDMYTDDELDIDNLSQYDIDHIIPQAFIKDDSIDNRVLVSSAKNRGKSDDVPSIEIVKARKMFWKNLLDAKLMSQRKYDNLTKAERGGLTSDDKARFIQRQLVETRQITKHVARILDERFNNELDSKGRRIRKVKIVTLKSNLVSNFRKEFGFYKIREVNNYHHAHDAYLNAVVAKAILTKYPQLEPEFVYGLYRRKKLSKIVREDKEEKYSEATRKMFFYSNLMNMFKRVVRLADGSIVVRPVIETGRYMGKTAWDKKKHFATVRKVLSYPQNNIVKKTEIQTGGFSKESILAHGNSDKLIPRKTKDIYLDPKKYGGFDSPIVAYSVLVVADIKKGKAQKLKTVTELLGITIMERSRFEKNTSAFLESKGYLNIRDDKLMILPKYSLFELENGRRRLLASAGELQKGNELALPTQFMKFLYLASRYNESKGKPEEIEKKQEFVNQHVSYFDDILQLINDFSNRVILADANLEKINKLYQDNKENIPVDELANNIINLFTFTSLGAPAAFKFFDKIVDRKRYTSTKEVLNSTLIHQSITGLYETRIDLGKLGEG

SEQ ID NO: 645 - protein, 1370 aa, Streptococcus agalactiae
MNKPYSIGLDIGTNSVGWSIITDDYKVPAKKMRVLGNTDKEYIKKNLIGALLFDGGNTAADRRLKRTARRRYTRRRNRILYLQEIFAEEMSKVDDSFFHRLEDSFLVEEDKRGSKYPIFATMQEEKYYHEKFPTIYHLRKELADKKEKADLRLIYLALAHIIKFRGHFLIEDDRFDVRNTDIQKQYQAFLEIFDTTFENNDLLSQNVDVEAILTDKISKSAKKDRILARYPNQKSTGIFAEFLKLIVGNQADFKKHFNLEDKTPLQFAKDSYDEDLENLLGQIGDEFADLFSAAKKLYDSVLLSGILTVTDLSTKAPLSASMIQRYDEHREDLKQLKQFVKASLPEKYQEIFADSSKDGYAGYIEGKTNQEAFYKYLSKLLTKQEGSEYLLEKIKNEDFLRKQRTFDNGSIPHQVHLTELRAIIRRQSEYYPFLKENLDRIEKILTFRIPYYVGPLAREKSDFAWMTRKTDDSIRPWNFEDLVDKEKSAEAFIHRMTNNDLYLPEEKVLPKHSLIYEKFTVYNELTKVRFLAEGFKDFQFLNRKQKETIFNSLFKEKRKVTEKDIISFLNKVDGYEGIAIKGIEKQFNASLSTYHDLKKILGKDFLDNTDNELILEDIVQTLTLFEDREMIRKRLDIYKDFFTESQLKKLYRRHYTGWGRLSAKLINGIRNKENQKTILDYLIDDGSANRNFMQLIKDAGLSFKPIIDKARTGSHSDNLKEVVGELAGSPAIKKGILQSLKIVDELVKVMGYEPEQIVVEMARENQTTAKGLSRLRQRLTTLRESLANLKSNILEEKKPKYVKDQVENHHLSDDRLFLYYLQNGKDMYTDDELDIDNLSQYDIDHIIPQAFIKDDSIDNRVLVSSAKNRGKSDDVPSVEIVKDCKVFWKKLLDAKLMSQRKYDNLTKAERGGLTSDDKARFIQRQLVETRQITKHVARILDERFNNELDSKGRRIRKVKIVTLKSNLVSNFRKEFGFYKIREVNNYHHAHDAYLNAVVAKAILTKYPQLEPEFVYGDYPKYNSYKTRKSATEKLFFYSNIMNFFKTKVTLADGTVVVKDDIEVNNDTGEIVWDKKKHFATVRKVLSYPQVNIVKKTEIQTGGFSKESILAHGNSDKLIPRKTKDIYLDPKKYGGFDSPIVAYSVLVVADIKKGKAQKLKTVTELLGITIMERSRFEKNPSAFLESKGYLNIRDDKLMILPKYSLFELENGRRRLLASADELQKGNELALPTQFMKFLYLASRYNELKGKPEEIEQKQEFVVQHVSYFDDILQIINDFSNRVILADANLEKINKLYQDNKENIPVDELANNIINLFTFTSLGAPAAFKFFDKIVDRKRYTSTKEVLNSTLIHQSITGLYETRIDLGKLGED

SEQ ID NO: 646 - protein, 1377 aa, Streptococcus agalactiae
MNKPYSIGLDIGTNSVGWSIITDDYKVPAKKMRVLGNTDKEYIKKNLIGALLFDGGNTAADRRLKRTARRRYTRRRNRILYLQEIFAEEMSKVDDSFFHRLEDSFLVEEDKRGSKYPIFATMQEEKYYHEKFPTIYHLRKELADKKEKADLRLVYLALAHIIKFRGHFLIEDDRFDVRNTDIQKQYQAFLEIFDTTFENNHLLSQNVDVEAILTDKISKSAKKDRILAQYPNQKSTGIFAEFLKLIVGNQADFKKHFNLEDKTPLQFAKDSYDEDLENLLGQIGDEFADLFSVAKKLYDSVLLSGILTVTDLSTKAPLSASMIQRYDEHHEDLKHLKQFVKASLPENYREVFADSSKDGYAGYIEGKTNQEAFYKYLLKLLTKQEGSEYFLEKIKNEDFLRKQRTFDNGSIPHQVHLTELRAIIRRQSEYYPFLKENQDRIEKILTFRIPYYVGPLAREKSDFAWMTRKTDDSIRPWNFEDLVDKEKSAEAFIHRMTNNDLYLPEEKVLPKHSLIYEKFTVYNELTKVRFLAEGFKDFQFLNRKQKETIFNSLFKEKRKVTEKDIISFLNKVDGYEGIAIKGIEKQFNASLSTYHDLKKILGKDFLDNTDNELILEDIVQTLTLFEDREMIKKCLDIYKDFFTESQLKKLYRRHYTGWGRLSAKLINGIRNKENQKTILDYLIDDGSANRNFMQLINDDDLSFKPIIDKARTGSHSDNLKEVVGELAGSPAIKKGILQSLKIVDELVKVMGYEPEQIVVEMARENQTTAKGLSRSRQRLTTLRESLANLKSNILEEKKPKYVKDQVENHHLSDDRLFLYYLQNGRDMYTKKALDIDNLSQYDIDHIIPQAFIKDDSIDNRVLVSSAKNRGKSDDVPSIEIVKARKMFWKNLLDAKLMSQRKYDNLTKAERGGLTSDDKARFIQRQLVETRQITKHVARILDERFNNEVDNGKKICKVKIVTLKSNLVSNFRKEFGFYKIREVNDYHHAHDAYLNAVVAKAILTKYPQLEPEFVYGMYRQKKLSKIVHEDKEEKYSEATRKMFFYSNLMNMFKRVVRLADGSIVVRPVIETGRYMGKTAWDKKKHFATVRKVLSYPQNNIVKKTEIQTGGFSKESILAHGNSDKLIPRKTKDIYLDPKKYGGFDSPIVAYSVLVVADIKKGKAQKLKTVTELLGITIMERSRFEKNPSAFLESKGYLNIRDDKLMILPKYSLFELENGRRRLLASAGELQKGNELALPTQFMKFLYLASRYNESKGKPEEIEKKQEFVNQHVSYFDDILQLINDFSKRVILADANLEKINKLYQDNKENIPVDELANNIINLFTFTSLGAPAAFKFFDKIVDRKRYTSTKEVLNSTLIHQSITGLYETRIDLGKLGED

SEQ ID NO: 647 - protein, 1370 aa, Streptococcus agalactiae
  misc_feature (117)..(117): Xaa can be any naturally occurring amino acid
MNKPYSIGLDIGTNSVGWSIITDDYKVPAKKMRVLGNTDKEYIKKNLIGALLFDGGNTAADRRLKRTARRRYTRRRNRILYLQEIFAEEMSKVDDSFFHRLEDSFLVEEDKRGSKYXIFATLQEEKDYHEKFSTIYHLRKELADKKEKADLRLIYIALAHIIKFRGHFLIEDDSFDVRNTDISKQYQDFLEIFNTTFENNDLLSQNVDVEAILTDKISKSAKKDRILAQYPNQKSTGIFAEFLKLIVGNQADFKKYFNLEDKTPLQFAKDSYDEDLENLLGQIGDEFADLFSAAKKLYDSVLLSGILTVIDLSTKAPLSASMIQRYDEHREDLKQLKQFVKASLPEKYQEIFADSSKDGYAGYIEGKTNQEAFYKYLSKLLTKQEDSENFLEKIKNEDFLRKQRTFDNGSIPHQVHLTELKAIIRRQSEYYPFLKENQDRIEKILTFRIPYYIGPLAREKSDFAWMTRKTDDSIRPWNFEDLVDKEKSAEAFIHRMTNNDFYLPEEKVLPKHSLIYEKFTVYNELTKVRYKNEQGETYFFDSNIKQEIFDGVFKEHRKVSKKKLLDFLAKEYEEFRIVDVIGLDKENKAFNASLGTYHDLEKILDKDFLDNPDNESILEDIVQTLTLFEDREMIKKRLENYKDLFTESQLKKLYRRHYTGWGRLSAKLINGIRDKESQKTILDYLIDDGRSNRNFMQLINDDGLSFKSIISKAQAGSHSDNLKEVVGELAGSPAIKKGILQSLKIVDELVKVMGYEPEQIVVEMARENQTTNQGRRNSRQRYKLLDDGVKNLASDLNGNILKEYPTDNQALQNERLFLYYLQNGRDMYTGEALDIDNLSQYDIDHIIPQAFIKDDSIDNRVLVSSAKNRGKSDDVPSLEIVKDCKVFWKKLLDAKLMSQRKYDNLTKAERGGLTSDDKARFIQRQLVETRQITKHVARILDERFNNELDSKGRRIRKVKIVTLKSNLVSNFRKEFGFYKIREVNNYHHAHDAYLNAVVAKAILTKYPQLEPEFVYGDYPKYNSYKTRKSATEKLFFYSNIMNFFKTKVTLADGTVVVKDDIEVNNDTGEIVWDKKKHFATVRKVLSYPQNNIVKKTEIQTGGFSKESILAHGNSDKLIPRKTKDIYLDPKKYGGFDSPIVAYSVLVVADIKKGKAQKLKTVTELLGITIMERSRFEKNPSAFLESKGYLNIRADKLIILPKYSLFELENGRRRLLASAGELQKGNELALPTQFMKFLYLASRYNESKGKPEEIEKKQEFVNQHVSYFDDILQLINDFSKRVILADANLEKINKLYQDNKENISVDELANNIINLFTFTSLGAPAAFKFFDKIVDRKRYTSTKEVLNSTLIHQSITGLYETRIDLGKLGED

SEQ ID NO: 648 - protein, 1370 aa, Streptococcus agalactiae
MNKPYSIGLDIGTNSVGYSVVTDDYKVPAKKMRVLGNTDKEYIKKNLIGALLFDGGNTASDRRLKRTARRRYTRRRNRILYLQEIFAEEMSKVDDSFFHRLEDSFLVEDDKRGSKYPIFATMQEEKDYHEKFPTIYHLRKELADKKEKADLRLVYLALAHIIKFRGHFLIEDDSFDVRNTDIQRQYQAFLEIFDTTFENNHLLSQNIDVEGILTDKISKSAKKDRILAQYPNQKSTGIFAEFLKLIVGNQADFKKHFNLEDKTPLQFAKDSYDEDLENLLGQIGDEFADLFSVAKKLYDSVLLSGILTVTDLSTKAPLSASMIQRYDEHREDLKQLKQFVKASLPEKYQEIFTDSSKDGYAGYIEGKTNQGAFYKYLSKLLTKQEGSEYFLEKIKNEDFLRKQRTFDNGSIPHQVHLTELKAIIRRQSEYYPFLKENLDRIEKILTFRIPYYVGPLAREKSDFAWMTRKTDDSIRPWNFEELVDKEASAEAFIHRMTNNDLYLPEEKVLPKHSLIYEKFTVYNELTKVRYKNEQGETYFFDSNIKQEIFDGVFKEHRKVSKKKLLDFLAKEYEEFRIVDVIGLDKENKAFNASLGTYHDLKKILDKDFLDNPDNESILEDIVQTLTLFEDREMIKKRLENYKDLFTESQLKKLYRRHYTGWGRLSAKLINGIRDKESQKTILDYLISDGRANRNFMQLIHDDGLSFKPIIDKAQAGSHSDNLKEVVGELAGSPAIKKGILQSLKIVDELVKVMGYEPEQVVVEMARENQTTNQGRRNTRQRYKLLEEGVKNLASDLNGNILKEYPTDNQALQNERLFLYYLQNGRDMYTGEALDIDNLSQYDIDHIVPQAFIKDDSIDNRVLVSSAKNRGKSDNVPSIDIVKARKAFWKKLLDAKLMSQRKYDNLTKAERGGLTSDDKARFIQRQLVETRQITKHVARILDERFNNELDSKGRRIRKVKIVTLKSNLVSNFRKEFGFYKIREVNDYHHAHDAYLNAVVAKAILTKYPQLEPEFVYGDYPKYNSYKTRKSATEKLFFYSNIMNFFKTKVTLADGTVVVKDDIEVNNDTGEIVWDKKKHFATVRKVLSYPQVNIVKKTEIQTGGFSKESILAHGNSDKLIPRKTKDIYLDPKKYGGFDSPIVAYSVLVVADIKKGKAQKLKTVTELLGITIMERFRFEKNPSAFLESKGYLNIRDDKLMILPKYSLFELENGRRRLLASAGELQKGNELALPTQYMKFLYLASRYNELKGKPEEIEQKQEFVVQHVSYFDDILQIINDFSNRVILADANLEKINKLYQDNKENISVDELANNIINLFTFTSLGAPAAFKFFDKIVDRKRYTSTKEVLNSTLIHQSITGLYETRIDLGKLGED

SEQ ID NO: 649 - protein, 1370 aa, Streptococcus agalactiae
MNKPYSIGLDIGTNSVGYSVVTDDYKVPAKKMRVLGNTDKEYIKKNLIGALLFDGGNTASDRRLKRTARRRYTRRRNRILYLQEIFAEEMSKVDDSFFHRLEDSFLVEDDKRGSKYPIFATMQEEKDYHEKFPTIYHLRKELADKKEKANLRLVYLALAHIIKFRGHFLIEDDSFDVRNTDIQRQYQAFLEIFDTTFENNHLLSQNIDVEGILTDKISKSAKKDRILAQYPNQKSTGIFAEFLKLIVGNQADFKKHFNLEDKTPLQFAKDSYDEDLENLLGQIGDEFADLFSVAKKLYDSVLLSGILTVTDLSTKAPLSASMIQRYDEHREDLKQLKQFVKASLPEKYQEIFTDSSKDGYAGYIEGKTNQGAFYKYLSKLLTKQEGSEYFLEKIKNEDFLRKQRTFDNGSIPHQVHLTELKAIIRRQSEYYPFLKENLDRIEKILTFRIPYYVGPLAREKSDFAWMTRKTDDSIRPWNFEELVDKEASAEAFIHRMTNNDLYLPEEKVLPKHSLIYEKFTVYNELTKVRYKNEQGETYFFDSNIKQEIFDGVFKEHRKVSKKKLLDFLAKEYEEFRIVDVIGLDKENKAFNASLGTYHDLKKILDKDFLDNPDNESILEDIVQTLTLFEDREMIKKRLENYKDLFTESQLKKLYRRHYTGWGRLSAKLINGIRDKESQKTILDYLISDGRANRNFMQLIHDDGLSFKPIIDKAQAGSHSDNLKEVVGELAGSPAIKKGILQSLKIVDELVKVMGYEPEQVVVEMARENQTTNQGRRNTRQRYKLLEEGVKNLASDLNGNILKEYPTDNQALQNERLFLYYLQNGRDMYTGEALDIDNLSQYDIDHIVPQAFIKDDSIDNRVLVSSAKNRGKSDNVPSIDIVKARKAFWKKLLDAKLMSQRKYDNLTKAERGGLTSDDKARFIQRQLVETRQITKHVARILDERFNNELDSKGRRIRKVKIVTLKSNLVSNFRKEFGFYKIREVNDYHHAHDAYLNAVVAKAILTKYPQLEPEFVYGDYPKYNSYKTRKSATEKLFFYSNIMNFFKTKVTLADGTVVVKDDIEVNNDTGEIVWDKKKHFATVRKVLSYPQVNIVKKTEIQTGGFSKESILAHGNSDKLIPRKTKDIYLDPKKYGGFDSPIVAYSVLVVADIKKGKAQKLKTVTELLGITIMERFRFEKNPSAFLESKGYLNIRDDKLMILPKYSLFELENGRRRLLASAGELQKGNELALPTQYMKFLYLASRYNELKGKPEEIEQKQEFVVQHVSYFDDILQIINDFSNRVILADANLEKINKLYQDNKENISVDELANNIINLFTFTSLGAPAAFKFFDKIVDRKRYTSTKEVLNSTLIHQSITGLYETRIDLGKLGED

SEQ ID NO: 650 - protein, 1370 aa, Streptococcus agalactiae
  misc_feature (9)..(9): Xaa can be any naturally occurring amino acid
MNKPYSIGXDIGTNSVGWSIITDDYKVPAKKMRVLGNTDKEYIKKNLIGALLFDGGNTAADRRLKRTARRRYTRRRNRILYLQEIFAEEMSKVDDSFFHRLEDSFLVEEDKRGSKYPIFATLQEEKDYHEKFSTIYHLRKELADKKEKADLRLIYIALAHIIKFRGHFLIEDDSFDVRNTDISKQYQDFLEIFNTTFENNDLLSQNVDVEAILTDKISKSAKKDRILAQYPNQKSTGIFAEFLKLIVGNQADFKKYFNLEDKTPLQFAKDSYDEDLENLLGQIGDEFADLFSAAKKLYDSVLLSGILTVIDLSTKAPLSASMIQRYDEHREDLKQLKQFVKASLPEKYQEIFADSSKDGYAGYIEGKTNQEAFYKYLSKLLTKQEDSENFLEKIKNEDFLRKQRTFDNGSIPHQVHLTELKAIIRRQSEYYPFLKENQDRIEKILTFRIPYYIGPLAREKSDFAWMTRKTDDSIRPWNFEDLVDKEKSAEAFIHRMTNNDFYLPEEKVLPKHSLIYEKFTVYNELTKVRYKNEQGETYFFDSNIKQEIFDGVFKEHRKVSKKKLLDFLAKEYEEFRIVDVIGLDKENKAFNASLGTYHDLEKILDKDFLDNPDNESILEDIVQTLTLFEDREMIKKRLENYKDLFTESQLKKLYRRHYTGWGRLSAKLINGIRDKESQKTILDYLIDDGRSNRNFMQLINDDGLSFKSIISKAQAGSHSDNLKEVVGELAGSPAIKKGILQSLKIVDELVKVMGYEPEQIVVEMARENQTTNQGRRNSRQRYKLLDDGVKNLASDLNGNILKEYPTDNQALQNERLFLYYLQNGRDMYTGEALDIDNLSQYDIDHIIPQAFIKDDSIDNRVLVSSAKNRGKSDDVPSLEIVKDCKVFWKKLLDAKLMSQRKYDNLTKAERGGLTSDDKARFIQRQLVETRQITKHVARILDERFNNELDSKGRRIRKVKIVTLKSNLVSNFRKEFGFYKIREVNNYHHAHDAYLNAVVAKAILTKYPQLEPEFVYGDYPKYNSYKTRKSATEKLFFYSNIMNFFKTKVTLADGTVVVKDDIEVNNDTGEIVWDKKKHFATVRKVLSYPQNNIVKKTEIQTGGFSKESILAHGNSDKLIPRKTKDIYLDPKKYGGFDSPIVAYSVLVVADIKKGKAQKLKTVTELLGITIMERSRFEKNPSAFLESKGYLNIRADKLIILPKYSLFELENGRRRLLASAGELQKGNELALPTQFMKFLYLASRYNESKGKPEEIEKKQEFVNQHVSYFDDILQLINDFSKRVILADANLEKINKLYQDNKENISVDELANNIINLFTFTSLGAPAAFKFFDKIVDRKRYTSTKEVLNSTLIHQSITGLYETRIDLGKLGED

SEQ ID NO: 651 - protein, 1125 aa, Streptococcus anginosus
MNGLVLGLDIGIASVGVGILNKETGEIIHANSRIFPAATADSNVERRGFRQGRRLGRRKKHRSARLNNLFEEFGFITDFSAIPLNLNPYALRVKGLSEELTNEELFIALKNIIKRRGISYLDDASEDGETASNEYGKAVEENRKLLADKTPGQIQLERFEKYGQVRGDFTVVENGENHRLINVFSTSAYKKEAERILRRQQEFNVRISDEFIEAYLTILTGKRKYYHGPGNEKSRTDYGRFRTDGTTLDNIFGILIGKCTFYPDEYRAAKASYTAQEFNLLNDLNNLTVPTETKKLSPEQKRQIVEYARTAKTLGTPTLLKYIAKLVDGSIDDIKGYRIDKSDKPEMHTFDAYRKMRTLDLVNIDALSRETLDDLAHILTLNTESEGILEALNSKMPSTFTKEQIDELIQFRKKNSAVFGKGWHNFSLKLMNELISELYETSEEQMTILTRLGKQRSREISKRTKYIDEKELTEEIYNPVVAKSVRQAIKIINEATKRYGIFDNIVIEMARENNEEDAKKDYIKRQKANQDEKNASMEKAAFQYNGKKELPDSIFHGHKELATKIRLWHQQGERCLYTGKNISIRDLIHNPHQYEIDHILPLSLSFDDGLANKVLVLATANQEKGQRTPFQAIDSMDDAWSYREFKQYVRNSKSLSNKKKDYLLTEEDISKIEVKQKFIERNLVDTRYSSRVVLNTLQEFYKTNDFDTKISVVRGQFTSQLRRKWKIEKSRDTYHHHAVDALIIAASSQLRLWKKQNNPLISYKEGQFVDPETGEILSLTDDEYKELVFRPPYDYFVDTLKSKSFEDSILFSYQVDSKYNRKISDATIYGTRKAQLGKDKQEETYVLGKIKDIYSQKGYEDFIKRYNKDETQFLIYHKDPQTFEKVIEEILKTYPDKELNEKGKEIPCNPFEKYRQENGPIRKYSKKGKGPEIKSLKYYDNKLGNHIDITPVNSQNQVVLQSLKPWRTDVYFNPRTSKYELMGLKYSDLRFEKGSGSYGISPEKYNKVKAKEGVNEDSEFKFTLYKNDLILIKDTETGEQQLFRYGSRNDTSKHYVELKPYEKAKFEGNQQLMNLLGTVAKGGQCLKGINKPNLSIYKVKTDVLGNKYFIKKEGDQPQLNFKKKF

SEQ ID NO: 652 - protein, 1386 aa, Streptococcus anginosus
MNQKYSIGLDIGTNSVGWAVITDDYKVPAKKMKVLGNTDKQSIKKNLLGALLFDSGETAEATRLKRTARRRYTRRRNRLRYLQEIFAEEMMQVDESFFQRLDDSFLVDEDKRGERHPIFGNIAAEVKYHDEFPTIYHLRKHLADISQKADLRLVYLALAHMIKFRGHFLIEGQLKAENTNVQALFKDFVEVYDKTVEESHLSEITVDALSILTEKVSKSRRLENLIAHYPAEKKNTLFGNLIALFLGLQPNFKTNFQLSEDAKLQFSKDTYEEDLEGLLGEVGDEYADLFASAKNLYDAILLSGILTVDDNSTKAPLSASMVKRYEEHQKDLKKFEDFIKVNALDQYNAIFKDKNKKGYAGYIESGVKQDEFYKYLKGILLQINGSGDFLDKIDREDFLRKQRTFDNGSIPHQIHLQEMHAILRRQGEHYPFLKENQDKIEKILTFRIPYYVGPLARKGSRFAWAEYKADEKITPWNFDDILDKEKSAEKFITRMTLNDLYLPEEKVLPKHSLLYETFTVYNELTKVKYVNEQGEAKFFDANMKQEIFDHVFKENRKVTKDKLLNYLNKEFEEFRIVNLTGLDKENKVFNSSLGTYHDLRKILNKSFLDNKENAQIIEDIIQTLTLFEDREMIRQRLQKYSDIFTKAQLKKLERRHYTGWGRLSYKLINGIRNKENKKTILDYLIDDGYANRNFMQLINDDALSFKEEIAKAQIIGDVDDIANVVHDLPGSPAIKKGILQSVKIVDELVKVMGHNPANIIIEMARENQTTDRGRRNSQQRLKLLQDSLKNLDNPVNIKNVENQQLQNDRLFLYYIQNGKDMYTGETLDINNLSQYDIDHIIPQAYIKDDSFDNRVLTSSSENRGKSDNVPSIEVVCARKADWMRLRKAGLISQRKFDNLTKAERGGLTENDKAGFIKRQLVETRQITKHVAQVLDARFNAKHDENKKVIRDVKIITLKSNLVSQFRKDFKFYKVREINDYHHAHDAYLNAVIGTALLKKYPKLASEFVYGEFKKYDVRKFIAKSDKEIGKATAKYFFYSNLMNFFKKEVKFADGTVVERPDIETSEDGEIAWNKQTDFKIVRKVLSYPQVNIVKKTEVQTHGLDRGKPRGLFNANPSPKPKPDSSENLVGVKRNLDPKKYGGYAGISNSYAVLVKAIIEKGVKKKETMVLEFQGISILDRITFEKDKRAFLLGKGYKDIKKIIELPKYSLFELKDGSRRMLASILSTNNKRGEIHKGNELFVPQKFTTLLYHAKRINNPINKDHIEYVKKHRDDFKELLNYVLEFNEKYVGATKNGERLKEAVADFDSKSNEEICTSFLGAVNSKNAGLFELTSLGSASDFEFLGVKIPRYRDYTPSSLLKDSTLIHQSITGLYETRIDLSKLGED

SEQ ID NO: 653 - protein, 1396 aa, Streptococcus anginosus
MTKPYSIGLDIGTNSVGWAVITDDYKVPAKKMKVLGNTNRDYIKKNLLGALLFDGGETAEGRRLKRTARRRYTRRKNRLRYLQEIFAEEMMQVDESFFQRLDDSFLVEEDKQGSKYPIFGTLKEEKEYHKKFKTIYHLREELANSKEKADLRLVYLALAHMIKFRGHFLYEGDLKAENTDVQALFKDFVEEYDKTIEESHLSEITVDALSILTEKVSKSSRLENLIAHYPTEKKNTLFGNLIALSLGLQANFKTNFQLSEDAKLQFSKDTYEEDLEGLLGEVGDEYADLFVSAKNLYDAILLSGILTVDDNSTKAPLSASMVKRYKEHKEELAAFKRFIKEKLPKKYEEIFKDDTKNGYAGYVGADKKLRKRSGKLATEEEFYKYVKGILNKVEGADYFLDKIDREDFLRKQRTFDNGSIPHQIHLQEMHAILRRQGEHYPFLKENQDKIEKILTFRIPYYVGPLARKGSRFAWAEYKADEKITPWNFDDILDKEKSAEKFITRMTLNDLYLPEEKVLPKHSPLYETFTVYNELTKVKYVNEQGEAKFFDTNMKQEIFDHVFKENRKVTKDKLLNYLNKEFEEFRIVNLTGLDKENKAFNASLGTYHDLRKILDKSFLDDKVNEKIIEDIIQTLTLFEDREMIRQRLQKYSDIFTTQQLKELERRHYTGWGRLSYKLINGIRNKENKKTILDYLIDDGYANRNFMQLINDDALSFKEEIARAQIIGDVDDIANVVHDLPGSPAIKKGILQSVKIVDELVKVMGHNPTNIIIEMARENQTTDKGRRNSQQRLKLLQDSLKNLDNPVNIKNVENQQLQNDRLFLYYIQNGKDMYTGETLDINNLSQYDIDHIIPQAFIKDNSLDNRVLTRSDKNRGKSDDVPSIEVVHEMKSFWSKLLSVKLITQRKFDNLTKAERGGLTENDKAGFIKRQLVETRQITKHVAQVLDARFNAKHDENKKVIRDVKIITLKSNLVSQFRKDFKFYKVREINDYHHAHDAYLNAVIGTALLKKYPKLASEFVYGEFKKYDVRKFIAKSDKEIGKATAKYFFYSNLMNFFKKEVKFADGTVVERPDIETSEDGEIAWNKQTDFKIVRKVLSYPQVNIVKKTEVQTHGLDRGKPRGLFNANPSPKPKPDSSENLVGIKRNLDPKKYGGYAGISNSYAVLVKAIIEKGVKKKETMVLEFQGISILDRITFEKDKRAFLLGKGYKDIKKIIELPKYSLFELKDGSRRMLASILSTNNKRGEIHKGNELFVPQKFTTLLYHAKRINNPINKDHIEYVKKHRDDFKELLNYVLEFNEKYVGATKNGERLKEAVADFDSKSNEEICTSFLGAVNSKNAGLFELTSLGSASDFEFLGVKIPRYRDYTPSSLLKDSILIHQSITGLYETRIDLSKLGED

SEQ ID NO: 654 - protein, 1375 aa, Streptococcus canis
MEKKYSIGLDIGTNSVGWAVITDDYKVPSKKFKVLGNTNRKSIKKNLMGALLFDSGETAEATRLKRTARRRYTRRKNRIRYLQEIFANEMAKLDDSFFQRLEESFLVEEDKKNERHPIFGNLADEVAYHRNYPTIYHLRKKLADSPEKADLRLIYLALAHIIKFRGHFLIEGKLNAENSDVAKLFYQLIQTYNQLFEESPLDEIEVDAKGILSARLSKSKRLEKLIAVFPNEKKNGLFGNIIALALGLTPNFKSNFDLTEDAKLQLSKDTYDDDLDELLGQIGDQYADLFSAAKNLSDAILLSDILRSNSEVTKAPLSASMVKRYDEHHQDLALLKTLVRQQFPEKYAEIFKDDTKNGYAGYVGIGIKHRKRTTKLATQEEFYKFIKPILEKMDGAEELLAKLNRDDLLRKQRTFDNGSIPHQIHLKELHAILRRQEEFYPFLKENREKIEKILTFRIPYYVGPLARGNSRFAWLTRKSEEAITPWNFEEVVDKGASAQSFIERMTNFDEQLPNKKVLPKHSLLYEYFTVYNELTKVKYVTERMRKPEFLSGEQKKAIVDLLFKTNRKVTVKQLKEDYFKKIECFDSVEIIGVEDRFNASLGTYHDLLKIIKDKDFLDNEENEDILEDIVLTLTLFEDREMIEERLKTYAHLFDDKVMKQLKRRHYTGWGRLSRKMINGIRDKQSGKTILDFLKSDGFSNRNFMQLIHDDSLTFKEEIEKAQVSGQGDSLHEQIADLAGSPAIKKGILQTVKIVDELVKVMGHKPENIVIEMARENQTTTKGLQQSRERKKRIEEGIKELESQILKENPVENTQLQNEKLYLYYLQNGRDMYVDQELDINRLSDYDVDHIVPQSFIKDDSIDNKVLTRSVENRGKSDNVPSEEVVKKMKNYWRQLLNAKLITQRKFDNLTKAERGGLSEADKAGFIKRQLVETRQITKHVARILDSRMNTKRDKNDKPIREVKVITLKSKLVSDFRKDFQLYKVRDINNYHHAHDAYLNAVVGTALIKKYPKLESEFVYGDYKVYDVRKMIAKSEQEIGKATAKRFFYSNIMNFFKTEVKLANGEIRKRPLIETNGETGEVVWNKEKDFATVRKVLAMPQVNIVKKTEVQTGGFSKESILSKRESAKLIPRKKGWDTRKYGGFGSPTVAYSILVVAKVEKGKAKKLKSVKVLVGITIMEKGSYEKDPIGFLEAKGYKDIKKELIFKLPKYSLFELENGRRRMLASATELQKANELVLPQHLVRLLYYTQNISATTGSNNLGYIEQHREEFKEIFEKIIDFSEKYILKNKVNSNLKSSFDEQFAVSDSILLSNSFVSLLKYTSFGASGGFTFLDLDVKQGRLRYQTVTEVLDATLIYQSITGLYETRTDLSQLGGD

SEQ ID NO: 655 - protein, 1345 aa, Streptococcus constellatus
MGKPYSIGLDIGTNSVGWAVVTDDYKVPAKKMKVLGNTDKQSIKKNLLGALLFDSGETAEATRLKRTARRRYTRRKNRLRYLQEIFTGEMNKVDENFFQRLDDSFLVDEDKRGEHHPIFGNIAAEVKYHDDFPTIYHLRRHLADTSKKADLRLVYLALAHMIKFRGHFLYEGDLKAENTDVQALFKDFVEEYDKTIEESHLSEITVDALSILTEKVSKSSRLENLIAHYPTEKKNTLFGNLIALSLDLHPNFKTNFQLSEDAKLQFSKDTYEEDLEGFLGEVGDEYADLFASAKNLYDAILLSGILTVDDNSTKAPLSASMVKRYEEHQKDLKKLKDFIKVNAPDQYNAIFKDKNKKGYASYIESGVKQDEFYKYLKGILLKINGSGDFLDKIDREDFLRKQRTFDNGSIPHQIHLQEMHAILRRQGEHYPFLKENQDKIEKILTFRIPYYVGPLARKGSRFAWAEYKADEKITPWNFDDILDKEKSAEKFITRMTLNDLYLPEEKVLPKHSPLYEAFTVYNELTKVKYVNEQGEAKFFDTNMKQEIFDHVFKENRKVTKDKLLNYLNKEFEEFRIVNLTGLDKENKAFNSSLGTYHDLRKILDKSFLDDKANEKTIEDIIQTLTLFEDREMIRQRLQKYSDIFTKAQLKKLERRHYTGWGRLSYKLINGIRNKENKKTILDYLIDDGYANRNFMQLINDDALSFKEEIARAQIIDDVDDIANVVHDLPGSPAIKKGILQSVKIVDELVKVMGHNPANIIIEMARENQTTDKGRRNSQQRLKLLQDSLKNLDNPVNIKNVENQQLQNDRLFLYYIQNGKDMYTGETLDINNLSQYDIDHIIPQAFIKDNSLDNRVLTRSDKNRGKSDDVPSIEVVHEMKSFWSKLLSVKLITQRKFDNLTKAERGGLTEEDKAGFIKRQLVETRQITKHVAQILDERFNTEFDGNKRRIRNVKIITLKSNLVSNFRKEFELYKVREINDYHHAHDAYLNAVVGNALLLKYPQLEPEFVYGEYPKYNSYRSRKSATEKFLFYSNILRFFKKEDIQTNEDGEIAWNKEKHIKILRKVLSYPQVNIVKKTEEQTGGFSKESILPKGESDKLIPRKTKNSYWDPKKYGGFDSPVVAYSILVFADVEKGKSKKLRKVQDMVGITIMEKKRFEKNPVDFLEQRGYRNVRLEKIIKLPKYSLFELENKRRRLLASAKELQKGNELVIPQRFTTLLYHSYRIEKDYEPEHREYVEKHKDEFKELLEYISVFSRKYVLADNNLTKIEMLFSKNKDAEVSSLAKSFISLLTFTAFGAPAAFNFFGENIDRKRYTSVTECLNATLIHQSITGLYETRIDLSKLGED

SEQ ID NO: 656 - protein, 538 aa, Streptococcus dysgalactiae
DYDVDHIVPQSFIKDDSIDNKVLTRSDKNRGKSDNVPSEEVVKKMKNYWRQLLNAKLITQRKFDNLTKAERGGLSELDKAGFIKRQLVETRQITKHVAQILDSRMNTKYDENDKLIREVKVITLKSKLVSDFRKDFQFYKVREINNYHHAHDAYLNAVVGTALIKKYPKLESEFVYGDYKVYDVRKMIAKSEQEIGKATAKRFFYSNIMNFFKTEITLANGEIRKRPLIETNEETGEIVWDKGRDFATVRKVLSMPQVNIVKKTEVQTGALTNESIYARGSFDKLISRKHRFESSKYGGFGSPTVTYSVLVVAKSKVQDGKVKKIKTGKELIGITLLDKLVFEKNPLKFIEDKGYGNVQIDKCIRLPKYSLFEFENGTRRMLASVMANNNSRGDLQKANEMFLPAKLVTLLYHAHKIESSKELEHEAYILDHYNDLYQLLSYIERFASLYVDVEKNISKVKELFSNIESYSISEICSSVINLLTLTASGAPADFKFLGTTIPRKRYGSPQSILSSTLIHQSITGLYETRIDLSQLGGD

SEQ ID NO: 657 - protein, 1155 aa, Streptococcus dysgalactiae
MDKKYSIGLDIGTNSVGWAVITDDYKVPSKKFKVLGNTDRHSIKKNLIGALLFDSGETAEATRLKRSARRRYTRRKNRIRYLQEIFSSEMSKVDDSFFHRLEESFLVEEDKKHERHPIFGNIVDEVAYHEKYPTIYHLRKKLADSTDKADLRLIYLALAHMIKFRGHFLIEGDLNPDNSDMDKLFIQLVQTYNQLFEENPINASRVDAKAILSARLSKSRRLENLIAQLPGEKRNGLFGNLIALSLGLTPNFKSNFDLAEDAKLQLSKDTYDDDLDNLLAQIGDQYADLFLAAKNLSDAILLSDILRVNSEITKAPLSASMIKRYDEHHQDLTLLKALVRQQLPEKYKEIFFDQSKNGYAGYIDGGASQEEFYKFIKPILEKMDGTEELLAKLNREDLLRKQRTFDNGSIPHQIHLGELHAILRRQEDFYPFLKDNREKIEKILTFRIPYYVGPLARGNSRFAWMTRKSEETITPWNFEEVVDKGASAQSFIERMTNFDKNLPNEKVLPKHSLLYEYFTVYNELTKVKYVTEGMRKPEFLSGKQKEAIVDLLFKTNRKVTVKQLKEDYFKKIECFDSVEISGVEDRFNASLGTYHDLLKIIKDKDFLDNEENEDILEDIVLTLTLFEDKEMIEERLKTYAHLFDDKVMKQLKRRHYTGWGRLSRKLINGIRDKQSGKTILDFLKSDGFANRNFIQLIHDDSLTFKEAIQKAQVSGQGHSLHEQIANLAGSPAIKKGILQSVKVVDELVKVMGHKPENIVIEMARENQTTQKGQKNSRERMKRIEEGIKELGSQILKEHPVENTQLQNEKLYLYYLQNRRDMYVDQELDINRLSDYDVDHIVPQSFIKDDSIDNKVLTRSDKNRGKSDDVPSEEVVKKMKNYWRQLLNAKLITQRKFDNLTKAERGGLSELDKAGFIKRQLVETRQITKHVAQILDSRMNTKYDENDKLIREVKVITLKSKLVSDFRKDFQFYKVREINNYHHAHDAYLNAVVGTALIKKYPKLESEFVYGDYKVYDVRKMIAKSEQEIGKATAKRFFYSNIMNFFKTEITLANGEIRKRPLIETNEETGEIVWDKGRDFATVRKVLSMPQVNIVKKTEVQTGALTNESIYARGSFDKLISRKHRFESSKYGGFGSPTVTYSVLVVAKYQSYKMEK

SEQ ID NO: 658 - protein, 1371 aa, Streptococcus dysgalactiae
MDKKYSIGLDIGTNSVGWAVITDDYKVPSKKFKVLGNTDRHSIKKNLIGALLFDSGETAEATRLKRTARRRYTRRKNRIRYLQEIFSSEMSKVDDSFFHRLEESFLVEEDKKHERHPIFGNIVDEVAYHEKYPTIYHLRKKLADSTDKADLRLIYLALAHMIKFRGHFLIEGDLNPDNSDMDKLFIQLVQTYNQLFEENPINASRVDAKAILSARLSKSRRLENLIAQLPGEKRNGLFGNLIALSLGLTPNFKSNFDLAEDAKLQLSKDTYDDDLDNLLAQIGDQYADLFLAAKNLSDAILLSDILRVNSEITKAPLSASMIKRYDEHHQDLTLLKALVRQQLPEKYKEIFFDQSKNGYAGYIDGGASQEEFYKFIKPILEKMDGTEELLAKLNREDLLRKQRTFDNGSIPHQIHLGELHAILRRQEDFYPFLKDNREKIEKILTFRIPYYVGPLARGNSRFAWMTRKSEETITPWNFEEVVDKGASAQSFIERMTNFDKNLPNEKVLPKHSLLYEYFTVYNELTKVKYVTEGMRKPEFLSGKQKEAIVDLLFKTNRKVTVKQLKEDYFKKIECFDSVEISGVEDRFNASLGTYHDLLKIIKDKDFLDNEENEDILEDIVLTLTLFEDKEMIEERLKTYAHLFDDKVMKQLKRRHYTGWGRLSRKLINGIRDKQSGKTILDFLKSDGFANRNFIQLIHDDSLTFKEAIQKAQVSGQGHSLHEQIANLAGSPAIKKGILQSVKVVDELVKVMGHKPENIVIEMARENQTTQKGQKNSRERMKRIEEGIKELGSQILKEHPVENTQLQNEKLYLYYLQNGRDMYVDQELDINRLSDYDVDHIVPQSFIKDDSIDNKVLTRSDKNRGKSDDVPSEEVVKKMKNYWRQLLNAKLITQRKFDNLTKAERGGLSELDKAGFIKRQLVETRQITKHVAQILDSRMNTKYDENDKLIREVKVITLKSKLVSDFRKDFQFYKVREINNYHHAHDAYLNAVVGTALIKKYPKLESEFVYGDYKVYDVRKMIAKSEQEIGKATAKRFFYSNIMNFFKTEITLANGEIRKRPLIETNEETGEIVWNKGRDFATVRKVLSMPQVNIVKKTEVQTGALTNESIYARGSFDKLISRKHRFESSKYGGFGSPTVTYSVLVVAKSKVQDGKVKKIKTGKELIGITLLDKLVFEKNPLKFIEDKGYGNVQIDKCIKLPKYSLFEFENGTRRMLASVMANNNSRGDLQKANEMFLPAKLVTLLYHAHKIESSKELEHEAYILDHYNDLYQLLSYIERFASLYVDVEKNISKVKELFSNIESYSISEICSSVINLLTLTASGAPADFKFLGTTIPRKRYGSPQSILSSTLIHQSITGLYETRIDLSQLGGD

SEQ ID NO: 659 - protein, 1371 aa, Streptococcus dysgalactiae
MDKKYSIGLDIGTNSVGWAVITDDYKVPSKKFKVLGNTDRHSIKKNLIGALLFDSGETAEATRLKRTARRRYTRRKNRIRYLQEIFSSEMSKVDDSFFHRLEESFLVEEDKKHERHPIFGNIVDEVAYHEKYPTIYHLRKKLADSTDKADLRLIYLALAHMIKFRGHFLIEGDLNPDNSDMDKLFIQLVQTYNQLFEENPINASRVDAKAILSARLSKSRRLENLIAQLPGEKRNGLFGNLIALSLGLTPNFKSNFDLAEDAKLQLSKDTYDDDLDNLLAQIGDQYADLFLAAKNLSDAILLSDILRVNSEITKAPLSASMIKRYDEHHQDLTLLKALVRQQLPEKYKEIFFDQSKNGYAGYIDGGASQEEFYKFIKPILEKMDGTEELLAKLNREDLLRKQRTFDNGSIPHQIHLGELHAILRRQEDFYPFLKDNREKIEKILTFRIPYYVGPLARGNSRFAWMTRKSEETITPWNFEEVVDKGASAQSFIERMTNFDKNLPNEKVLPKHSLLYEYFTVYNELTKVKYVTEGMRKPEFLSGKQKEAIVDLLFKTNRKVTVKQLKEDYFKKIECFDSVEISGVEDRFNASLGTYHDLLKIIKDKDFLDNEENEDILEDIVLTLTLFEDKEMIEERLKKYANLFDDKVMKQLKRRHYTGWGRLSRKLINGIRDKQSGKTILDFLKSDGFANRNFMQLINDDSLTFKEAIQKAQVSGQGHSLHEQIANLAGSPAIKKGILQSVKVVDELVKVMGHKPENIVIEMARENQTTQKGQKNSRERMKRIEEGIKELGSQILKEHPVENTQLQNEKLYLYYLQNGRDMYVDQELDINRLSDYDVDHIVPQSFIKDDSIDNKVLTRSDKNRGKSDNVPSEEVVKKMKNYWRQLLNAKLITQRKFDNLTKAERGGLSELDKAGFIKRQLVETRQITKHVAQILDSRMNTKYDENDKLIREVKVITLKSKLVSDFRKDFQFYKVREINNYHHAHDAYLNAVVGTALIKKYPKLESEFVYGDYKVYDVRKMIAKSEQEIGKATAKRFFYSNIMNFFKTEITLANGEIRKRPLIETNEETGEIVWDKGRDFATVRKVLSMPQVNIVKKTEVQTGALTNESIYARGSFDKLISRKHRFESSKYGGFGSPTVTYSVLVVAKSKVQDGKVKKIKTGKELIGITLLDKLVFEKNPLKFIEDKGYGNVQIDKCIKLPKYSLFEFENGTRRMLASVMANNNSRGDLQKANEMFLPAKLVTLLYHAHKIESSKELEHEAYILDHYNDLYQLLSYIERFASLYVDVEKNISKVKELFSNIESYSISEICSSVINLLTLTASGAPADFKFLGTTIPRKRYGSPQSILSSTLIHQSITGLYETRIDLSQLGGD

SEQ ID NO: 660 - protein, 1371 aa, Streptococcus dysgalactiae
MDKKYSIGLDIGTNSVGWAVITDDYKVPSKKFKVLGNTDRHSIKKNLIGALLFDSGETAEATRLKRTARRRYTRRKNRIRYLQEIFSSEMSKVDDSFFHRLEESFLVEEDKKHERHPIFGNIVDEVAYHEKYPTIYHLRKKLADSTDKADLRLIYLALAHMIKFRGHFLIEGDLNPDNSDVDKLFIQLVQTYNQLFEEKPINASGVDAKAILSARLSKSKRLENLIAQLPGEKKNGLFGNLIALSLGLTPNFKSNFDLAEDAKLQLSKDTYDDDLDNLLAQIGNQYADLFLAAKNLSDAILLSDILRVNSEITKAPLSASMIKRYDEHHQDLTLLKALVRQQLPEKYKEIFFDQSKNGYAGYIDGGASQEEFYKFIKPILEKMDGTEELLAKLNREDLLRKQRTFDNGSIPHQIHLGELHAILRRQEDFYPFLKDNREKIEKILTFRIPYYVGPLARGNSRFAWMTRKSEETITPWNFEEVVDKGASAQSFIERMTNFDKNLPNEKVLPKHSLLYEYFTVYNELTKVKYVTEGMRKPEFLSGKQKEAIVDLLFKTNRKVTVKQLKEDYFKKIECFDSVEISGVEDRFNASLGTYHDLLKIIKDKDFLDNEENEDILEDIVLTLTLFEDKEMIEERLKKYANLFDDKVMKQLKRRHYTGWGRLSRKLINGIRDKQSGKTILDFLKSDGFANRNFMQLINDDSLTFKEAIQKAQVSGQGHSLHEQIANLAGSPAIKKGILQSVKVVDELVKVMGHKPENIVIEMARENQTTQKGQKNSRERMKRIEEGIKELGSQILKEHPVENTQLQNEKLYLYYLQNGRDMYVDQELDINRLSDYDVDHIVPQSFIKDDSIDNKVLTRSDKNRGKSDNVPSEEVVKKMKNYWRQLLNAKLITQRKFDNLTKAERGGLSELDKAGFIKRQLVETRQITKHVAQILDSRMNTKYDENDKLIREVKVITLKSKLVSDFRKDFQFYKVREINNYHHAHDAYLNAVVGTALIKKYPKLESEFVYGDYKVYDVRKMIAKSEQEIGKATAKRFFYSNIMNFFKTEITLANGEIRKRPLIETNEETGEIVWDKGRDFATVRKVLSMPQVNIVKKTEVQTGALTNESIYARGSFDKLISRKHRFESSKYGGFGSPTVTYSVLVVAKSKVQDGKVKKIKTGKELIGITLLDKLVFEKNPLKFIEDKGYGNVQIDKCIKLPKYSLFEFENGTRRMLASVMANNNSRGDLQKANEMFLPAKLVTLLYHAHKIESSKELEHEAYILDHYNDLYQLLSYIERFASLYVDVEKNISKVKELFSNIESYSISEICSSVINLLTLTASGAPADFKFLGTTIPRKRYGSPQSILSSTLIHQSITGLYETRIDLSQLGGD

SEQ ID NO: 661 - protein, 1370 aa, Streptococcus gallolyticus; identical to SEQ ID NO: 209

SEQ ID NO: 662 - protein, 1375 aa, Streptococcus infantarius
MEKSYSIGLDIGTNSVGWAVITDDYKVPAKKMKVLGNTDKKYIKKNLLGALLFDSGETAEVTRLKRTARRRYTRRKNRLRYLQEIFAKEMTKVDESFFQRLEESFLTDDDKTFDSHPIFGNKAEEDAYHQKFPTIYHLRKYLADSQEKADLRLVYLALAHMIKYRGHFLIEGELNAENTDVQKLFNVFVETYDKIVDESHLSEIEVDASSILTEKVSKSRRLENLIKQYPTEKKNTLFGNLIALALGLQPNFKTNFKLSEDAKLQFSKDTYEEDLEELLGKVGDDYADLFISAKNLYDAILLSGILTVDDNSTKAPLSASMIKRYVEHHEDLEKLKEFIKINKLKLYHDIFKDKTKNGYAGYIDNGVKQDEFYKYLKTILTKIDDSDYFLDKIERDDFLRKQRTFDNGSIPHQIHLQEMHSILRRQGDYYPFLKENQAKIEKILTFRIPYYVGPLARKDSRFAWANYHSDEPITPWNFDEVVDKEKSAEKFITRMTLNDLYLPEEKVLPKHSHVYETFTVYNELTKIKYVNEQGESFFFDANMKQEIFDHVFKENRKVTKAKLLSYLNNEFEEFRINDLIGLDKDSKSFNASLGTYHDLKKILDKSFLDDKTNGQIIEDIVLTLTLFEDRDMIHERLQKYSDFFTSQQLKKLERRHYTGWGRLSYKLINGIRNKENNKTILDFLIDDGHANRNFMQLINDESLSFKTIIQEAQVVGDVDDIEAVVHDLPGSPAIKKGILQSVKIVDELVKVMGDNPDNIVIEMARENQTTGYGRNKSNQRLKRLQDSLKEFGSDILSKKKPSYVDSKVENSHLQNDRLFLYYIQNGKDMYTGEELDIDRLSDYDIDHIIPQAFIKDNSIDNKVLTSSAKNRGKSDDVPSIEIVRNRRSYWYKLYKSGLISKRKFDNLTKAERGGLTEADKAGFIKRQLVETRQITKHVAQILDARFNTKRDENDKVIRDVKVITLKSNLVSQFRKEFKFYKVREINDYHHAHDAYLNAVVGTALLKKYPKLTPEFVYGEYKKYDVRKLIAKSSDDYSEMGKATAKYFFYSNLMNFFKTEVKYADGRVFERPDIETNADGEVVWNKQKDFDIVRKVLSYPQVNIVKKVEAQTGGFSKESILSKGDSDKLIPRKTKKVYWNTKKYGGFDSPTVAYSVLVVADIEKGKAKKLKTVKELVGISIMERSFFEENPVSFLEKKGYHNVQEDKLIKLPKYSLFEFEGGRRRLLASATELQKGNEVMLPAHLVELLYHAHRIDSFNSTEHLKYVSEHKKEFEKVLSCVENFSNLYVDVEKNLSKVRAAAESMTNFSLEEISASFINLLTLTALGAPADFNFLGEKIPRKRYTSTKECLSATLIHQSVTGLYETRIDLSKLGEE

SEQ ID NO: 663 - protein, 1368 aa, Streptococcus iniae
MRKPYSIGLDIGTNSVGWAVITDDYKVPSKKMRIQGTTDRTSIKKNLIGALLFDNGETAEATRLKRTTRRRYTRRKYRIKELQKIFSSEMNELDIAFFPRLSESFLVSDDKEFENHPIFGNLKDEITYHNDYPTIYHLRQTLADSDQKADLRLIYLALAHIIKFRGHFLIEGNLDSENTDVHVLFLNLVNIYNNLFEEDIVETASIDAEKILTSKTSKSRRLENLIAEIPNQKRNMLFGNLVSLALGLTPNFKTNFELLEDAKLQISKDSYEEDLDNLLAQIGDQYADLFIAAKKLSDAILLSDIITVKGASTKAPLSASMVQRYEEHQQDLALLKNLVKKQIPEKYKEIFDNKEKNGYAGYIDGKTSQEEFYKYIKPILLKLDGTEKLISKLEREDFLRKQRTFDNGSIPHQIHLNELKAIIRRQEKFYPFLKENQKKIEKLFTFKIPYYVGPLANGQSSFAWLKRQSNESITPWNFEEVVDQEASARAFIERMTNFDTYLPEEKVLPKHSPLYEMFMVYNELTKVKYQTEGMKRPVFLSSEDKEEIVNLLFKKERKVTVKQLKEEYFSKMKCFHTVTILGVEDRFNASLGTYHDLLKIFKDKAFLDDEANQDILEEIVWTLTLFEDQAMIERRLVKYADVFEKSVLKKLKKRHYTGWGRLSQKLINGIKDKQTGKTILGFLKDDGVANRNFMQLINDSSLDFAKIIKNEQEKTIKNESLEETIANLAGSPAIKKGILQSIKIVDEIVKIMGQNPDNIVIEMARENQSTMQGIKNSRQRLRKLEEVHKNTGSKILKEYNVSNTQLQSDRLYLYLLQDGKDMYTGKELDYDNLSQYDIDHIIPQSFIKDNSIDNTVLTTQASNRGKSDNVPNIETVNKMKSFWYKQLKSGAISQRKFDHLTKAERGALSDFDKAGFIKRQLVETRQITKHVAQILDSRFNSNLTEDSKSNRNVKIITLKSKMVSDFRKDFGFYKLREVNDYHHAQDAYLNAVVGTALLKKYPKLEAEFVYGDYKHYDLAKLMIQPDSSLGKATTRMFFYSNLMNFFKKEIKLADDTIFTRPQIEVNTETGEIVWDKVKDMQTIRKVMSYPQVNIVMKTEVQTGGFSKESIWPKGDSDKLIARKKSWDPKKYGGFDSPIIAYSVLVVAKIAKGKTQKLKTIKELVGIKIMEQDEFEKDPIAFLEKKGYQDIQTSSIIKLPKYSLFELENGRKRLLASAKELQKGNELALPNKYVKFLYLASHYTKFTGKEEDREKKRSYVESHLYYFDEIMQIIVEYSNRYILADSNLIKIQNLYKEKDNFSIEEQAINMLNLFTFTDLGAPSAFKFFNGDIDRKRYSSTNEIINSTLIYQSPTGLYETRIDLSKLGGK

SEQ ID NO: 664 - protein, 1392 aa, Streptococcus mitis
MNNNNYSIGLDIGTNSVGWAVITDDYKVPSKKMKVLGNTDKHFIKKNLIGALLFDEGATAEDRRFKRTARRRYTRRKNRLRYLQEIFSEEMSKVDSSFFHRLDDSFLVPEDKRGSKYPIFATLAEEKEYHKKFPTIYHLRKHLADSKEKTDLRLIYLALAHMIKYRGHFLYEESFDIKNNDIQKIFSEFISIYDNTFEGSSLSGQNAQVEAIFTDKISKSAKRERILKLFAYEKSTDLFSEFLKLIVGNQADFKKHFDLEEKAPLQFSKDTYDEDLENLLGQIGDDFADLFLVAKKLYDAILLSGILTVTDSSTKAPLSASMIERYENHQKDLAALKQFIQNNLQEKYDEVFSDQSKDGYARYINGKTTQEAFYKYIKNLLSKFEGSDYFLDKIEREDFLRKQRTFDNGSIPHQIHLQEMNAIIRRQGEHYPFLKEYKEKIETILTFRIPYYVGPLARGNRNFAWLTRNSDQAIRPWNFEEIVDQASSAEEFINKMTNYDLYLPEEKVLPKHSLLYETFAVYNELTKVKFISEGLRDYQFLDSGQKKQIVNQLFKEKRKVTEKDIIQYLHNVDGYDGIELKGIEKQFNASLSTYHDLLKIIKDKEFMDDPKNEEILENIVHTLTIFEDREMIKQRLAQYASIFDKKVIKALTRRHYTGWGKLSAKLINGICDKKTGKTILDYLIDDGYSNRNFMQLINDDGLSFKDIIQKAQVVGKTNDVKQVVQELPGSPAIKKGILQSIKLVDELVKVMGHAPESIVIEIARENQTTARGKKNSQQRYKRIEDALKNLAPGLDSNILKEHPTDNIQLQNDRLFLYYLQNGKDMYTGEALDINQLSSYDIDHIVPQAFIKDDSLDNRVLTSSKDNRGKSDNVPSLEVVQKRKAFWQQLLDSKLISEHKFNNLTKAERGGLDERDKVGFIRRQLVETRQITKHVAQILDARFNTEVNEKDKKNRTVKIITLKSNLVSNFRKEFKLYKVREINDYHHAHDAYLNAVVAKAILKKYPKLEPGFVYGDYQKYDIKRYISRSKDPKEVEKATEKYFFYSNLLNFFKEEVHYADGTIVKRENIEYSKDTGEIAWNKEKDFATIKKVLSLPQVNIVKKTEIQTHGLDRGKPRGLFNSNPSPKPSEDRKENLVPIKQGLDPRKYGGYAGISNSYAVLVKAIIEKGAKKQQKTVLEFQGISILDKINFEKNKENYLLEKGYIKILSTITLPKYSLFEFPDGTRRRLASILSTNNKRGEIHKGNELVIPEKYTTLLYHAKNINKTLEPEHLEYVEKHRNDFAKLLEYVLNFNDKYVGALKNGERIRQAFIDWETVDIEKLCFSFIGPRNSKNAGLFELTSQGSASDFEFLGVKIPRYRDYTPSSLLNATLIHQSITGLYETRIDLSKLGED

SEQ ID NO: 665 - protein, 1134 aa, Streptococcus mutans
MANGKILGLDIGIASVGVGIIDKETGKIIHVNSRIFPAATADSNVERRGFRQGRRLVRRKKHRKVRLADLFLDSNLLTDFSKVSLNLNPYQLRVKGLNEELSNEELFIALKSIVSRRGISYLDDASEDSGANSSEYGKAVEENRKLLEDRTPGQIQLERFEKYGKVRGDFTVVENGENHRLINVFSTSAYKKEAERILRRQQEFNMRIADEFIEAYLTILTGKRKYYHGPGNEKSRTDYGRFRTDGTTLDNIFGILIGKCTFYPDEYRAAKASYTAQEFNLLNDLNNLTVPTETKKLSEEQKRQIIEHAKTVKTLGAPTLLKYIVKLVGCSADDIKGYRIDKSDKPEIHTFEAYRKMRTMELIKVDDLSRESLDALAHILTLNTEREGIEEAIRDRFTNKEFNQEQINELVLFRKNNSSLFGKGWHNFSLKLMKELIPELYETSEEQMTILTRLGKQRVKKSSNRTNYIDEKELTEEIYNPVVAKSVRQAIKIINLATKKYGVFDNIVIEMARESNEDDEKKAIQNAQKANEDEKKAALLKAAHQFNGKEELPDSIFHGHKELLTKIRLWHQQGEKCLYTGKTIFINDLIHNPYKYEIDHILPLSLSFDDSLANKVLVLSTANQEKGQRTPFQSLDSMDGAWTYREFKSYVKGLKTLSNKKKDYLLTEENIDKIEVKQKFIERNLVDTRYSSRVVLNALQDFYKERKFDTKISVVRGQFTSQLRRKWRIEKTRETYHHHAVDALIIAASSQLNLWKKQNNPLISYKEDQFVDPETGEILSLSDDEYKKLVFKAPYEHFVDTLKSKKFEDSILFSYQVDSKYNRKISGATICGTRKAQLGKDTQEETYVLGKIKDIYSQKGYEDFIKKYKKDKTQFLMYHKDPQTFEKVIEEILKTYPDKELNEKGKEVSCNPFEKYRQENGPVRKYSKKGNGPEIKSLKYYDEVLGKNIDITPKNSLNKVVLRSLNPWRTDVYFNHETRKYEFLGLKYSDLRYLKGEHRYGILIGDYKKIKDKEGIEKESEFKFTLYKNDLILIKDTAKGKEELFRFWSRTGKDNAKTFEKNKIELKPYSKSQFEKGEDTNVLGKLYASSNQLQKSFGTLENLSIYKVRTDVLGNKYFIKKEGDKPQLNFKKKL

SEQ ID NO: 666 - protein, 1134 aa, Streptococcus mutans; identical to SEQ ID NO: 665

SEQ ID NO: 667 - protein, 1128 aa, Streptococcus mutans
MANSKILGLDIGIASVGVGIIDKETGKIIHVNSRIFPAATADSNVERRGFRQGRRLVRRKKHRKVRLADLFLDSNLLTDFSKVSLNLNPYQLRVKGLNEELSNEELFIALKSIVSRRGISYLDDASEDSGANSSEYGKAVEENRKLLEDRTPGQIQLERFEKYGKVRGDFTVVENGENHRLINVFSTSAYKKEAERILRRQQEFNIRIADEFIEAYLTILTGKRKYYHGPGNEKSRTDYGRFRTDGTTLDNIFGILIGKCTFYPDEYRAAKASYTAQEFNLLNDLNNLTVPTETKKLSEEQKRQIIEHAKTVKTLGAPTLLKYIAKLVGCSADDIKGYRIDKSDKPEIHTFEAYRKMRTMELIKVADLSRESLDALAHILTLNTEREGIEEAIRDRFTNKEFNQEQINELVLFRKNNSSLFGKGWHNFSLKLMKELIPELYETSEEQMTILTRLGKQRVKKSSNRTNYIDEKELTEEIYNPVVAKSVRQAIKIINLATKKYGVFDNIVIEMARESNEDDEKKAIQNAQKANEDEKEAALLKAAHQFNGKEELPDSIFHGHKELLTKIRLWHQQGEKCLYTGKTIFINDLIHNPYKYEIDHILPLSLSFDDSLANKVLVLSTANQEKGQRTPFQSLDSMDGAWTYREFKAYVKGLKTLSNKKKDYLLNEEDINKNEVKQKFIERNLVDTRYSSRVVLNTLQDFYKKREFDTKISVVRGQFTSQIRRKWRIEKTRETYHHHAVDALIIAASSQLNLWKKQNNPLISYKEDQFVDPETGEILSLSDDEYKELVFKAPYDHFVDTLKSKKFEDSILFSYQVDSKYNRKISDATIYGTRKARLGKDSQEETYVLGKIKDIYSQKGYEDFIKKYKKDKTQFLMYHKDPQTFEKVIEEILKTYSDKELNEKGKEVPCNPFEKYRQENGPVRKYSKKGNGPEIKSIKYYDNKLGNHIDITPNNSHHQVVLQSLKPWRTDVYFNPKSGKYELMGLKYSDLRFEKVSGDYGISVKKYNEIKSKEGVDENSEFKFTLYKNDLILIKDTESGEQELFRFLSRTMPNQKHYVELKPYDKSKFEGHQKLMDIFGEVAKGGQCLKGLNKSNISIYKVKTDVLGNKYFIKKEGDQPQLNFKKKI

SEQ ID NO: 668 - protein, 1128 aa, Streptococcus mutans; identical to SEQ ID NO: 667

SEQ ID NO: 669 - protein, 1338 aa, Streptococcus mutans
MDLIGTNSVGWAVVTDDYKVPAKKMKVLGNTDKSHIKKNLLGALLFDSGNTAADRRLKRTARRRYTRRRNRILYLQEIFAEEMSKVDDSFFHRLEDSFLVTEDKRGERHPIFGNLEEEVKYHENFPTIYHLRQYLADNPEKVDLRLVYLALAHIIKFRGHFLIEGKFDTRNNDVQRLFQEFLAVYDNTFENSSLQEQNVQVEEILTDKISKSAKKDRVLKLFPNEKSNGRFAEFLKLIVGNQADFKKHFELEEKAPLQFSKDTYEEELEVLLAQIGDNYAELFLSAKKLYDSILLSGILTVTDVSTKAPLSASMIQRYNEHQMDLAQLKQFIRQKLSDKYNEVFSDVSKDGYAGYIDGKTNQEAFYKYLKGLLNKIEGSGYFLDKIEREDFLRKQRTFDNGSIPHQIHLQEMRAIIRRQAEFYPFLADNQDRIEKILTFRIPYYVGPLARGKSDFAWLSRKSADKITPWNFDEIVDKESSAEAFINRMTNYDLYLPNQKVLPKHSLLYEKFTVYNELTKVKYKTEQGKTAFFDANMKQEIFDGVFKVYRKVTKDKLMDFLEKEFDEFRIVDLTGLDKENKAFNASYGTYHDLRKILDKDFLDNSKNEKILEDIVLTLTLFEDREMIRKRLENYSDLLTKEQVKKLERRHYTGWGRLSAELIHGIRNKESRKTILDYLIDDGNSNRNFMQLINDDALSFKEEIAKAQVIGETDNLNQVVSDIAGSPAIKKGILQSLKIVDELVKIMGHQPENIVVEMARENQFTNQGRRNSQQRLKGLTDSIKEFGSQILKEHPVEHSQLQNDRLFLYYLQNGRDMYTGEELDIDYLSQYDIDHIIPQAFIKDNSIDNRVLTSSKENRGKSDDVPSKNVVRKMKSYWSKLLSAKLITQRKFDNLTKAERGGLTDDDKAGFIKRQLVETRQITKHVARILDERFHTETDENNKKIRQVKIVTLKSNLVSNFRKEFELYKVREINDYHHAHDAYLNAVIGKALLGVYPQLEPEFVYGDYPHFHGHKENKATAKKFFYSNIMNFFKKDDVRTDKNGEIIWKKDEHISNIKKVLSYPQVNIVKKVEEQTGGFSKESILPKGNSDKLIPRKTKKFYWDTKKYGGFDSPIVAYSILVIADIEKGKSKKLKTVKALVGVTIMEKMTFERDPVAFLERKGYRNVQEENIIKLPKYSLFKLENGRKRLLASARELQKGNEIVLPNHLGTLLYHAKNIHKVDEPKHLDYVDKHKDEFKELLDVVSNFSKKYTLAEGNLEKIKELYAQNNGEDLKELASSFINLLTFTAIGAPATFKFFDKNIDRKRYTSTTEILNATLIHQSITGLYETRIDLSKLGGD

SEQ ID NO: 670 - protein, 1338 aa, Streptococcus mutans; identical to SEQ ID NO: 669

SEQ ID NO: 671 - protein, 1345 aa, Streptococcus mutans
MKKPYSIGLDIGTNSVGWAVVTDDYKVPAKKMKVLGNTDKSHIEKNLLGALLFDSGNTAEDRRLKRTARRRYTRRRNRILYLQEIFSEEMGKVDDSFFHRLEDFFLVTEDKRGERHPIFGNLEEEVKYHENFPTIYHLRQYLADNPEKVDLRLVYLALAHIIKFRGHFLIEGKFDTRNNDVQRLFQEFLAVYDNTFENSSLQEQNVQVEEILTDKISKSAKKDRVLKLFPNEKSNGRFAEFLKLIVGNQADFKKHFELEEKAPLQFSKDTYEEELEVLLAQIGDNYAELFLSAKKLYDSILLSGILTADDSSTKAPLSASMIQRYNEHQMDLAQLKQFIRQKLSDKYNEVFSDVSKDGYAGYIDGKTNQEAFYKYLKGLLNKIEGSGYFLDKIEREDFLRKQRTFDNGSIPHQIHLQEMRAIIRRQSEFYPFLADNQDRIEKILTFRIPYYVGPLARGKSDFAWLSRKSADKITPWNFDEIVDKESSAEAFINRMTNYDLYLPNQKVLPKHSLLYEKFTVYNELTKVKYKTEQGETAFFDANMKQEIFDGVFKVYRKVTKDKLMDFLEKEFDEFRIVDLTGLDKENKAFNASYGTYHDLRKILDKDFLDNSKNEKILEDIVLTLTLFEDREMIRKRLKNYSDLLTKEQLKKLERRHYTGWGRLSAELIHGIRNKESRKTILDYLIDDGNSNRNFMQLINDDALSFKEEIAKAQVIGETDNLNQVVSDIAGSPAIKKGILQSLKIVDELVKIMGHQPENIVVEMARENQFTNQGRRNSQQRLKGLTDSIKEFGSQILKEHPVENSQLQNDRLFLYYLQNGRDMYTGEELDIDYLSQYDIDHIIPQAFIKDNSIDNRVLTSSKENRGKSDDVPSKDVVRKMKPYWSKLLSAKLITQRKFDNLTKAERGGLTDDDKAGFIKRQLVETRQITKHVARILDERFNTETDENNKKIRQVKIVTLKSNLVSNFRKEFELYKVREINDYHHAHDAYLNAVIGKALLGVYPQLEPEFVYGDYPHFHGHEENKATAKKFFYSNIMNFFKKDDVRTDKNGEIIWKKDEHISNIKKVLSYPQVNIVKKVEEQTGGFSKESILPKGNSDKLIPRKTKKFYWDTKKYGGFDSPIVAYSILVIADIEKGKSKKLKTVKALVGVTIMEKMTFERDPVAFLERKGYRNVQEENIIKLPKYSLFKLENGRKRLLASARELQKGNEIVLPNHLGTLLYHAKNIHKVDEPKHLDYVDKHKDEFKELLDVVSNFSKKYTLAEGNLEKIKELYAQNNGEDLKELASSFINLLTFTAIGAPATFKFFDKNIDRKRYTSTTEILNATLIHQSITGLYETRIDLSKLGGD

SEQ ID NO: 672 - protein, 1345 aa, Streptococcus mutans; identical to SEQ ID NO: 671

SEQ ID NO: 673 - protein, 1229 aa, Streptococcus mutans
MKKPYSIGLDIGTNSVGWAVVTDDYKVPAKKMKVLGNTDKSHIEKNLLGALLFDSGNTAEDRRLKRTARRRYTRRRNRILYLQEIFSEEMGKVDDSFFHRLEDSFLVTEDKRGERHPIFGNLEEEVKYHENFPTIYHLRQYLADNPEKVDLRLVYLALAHIIKFRGHFLIEGKFDTRNNDVQRLFQEFLAVYDNTFENSSLQEQNIQVEEILTDKISKSAKKDRVLKLFPNEKSNGRFAEFLKLIVGNQADFKKHFELEEKAPLQFSKDTYEEELEVLLAQIGDNYAELFLSAKKLYDSILLSGILTVTDVGTKAPLSASMIQRYNEHQMDLTQLKQFIRQKLSDKYNEVFSDVSKDGYAGYIDGKTNQEAFYKYLKGLLNKIEGSGYFLDKIEREDFLRKQRTFDNGSIPHQIHLQEMRAIIRRQAEFYPFLADNQDRIEKILTFRIPYYVGPLARGKSDFAWLSRKSADKITPWNFDEIVDKESSAEAFINRMTNYDLYLPNQKVLPKHSLLYEKFTVYNELTKVKYKTEQGKTAFFDANMKQEIFDGVFKVYRKVTKDKLMDFLEKEFDEFRIVDLTGLDKENKVFNASYGTYHDLCKILDKDFLDNSKNEKILEDIVLTLTLFEDREMIRKRLENYSDLLTKEQVKKLERRHYTGWGRLSAELIHGIRNKESRKTILDYLIDDGNSNRNFMQLINDDALSFKEEIAKAQVIGETDNLNQVVSDIAGSPAIKKGILQSLKIVDELVKIMGHQPENIVVEMARENQFTNQGRRNSQQRLKGLTDSIKEFGSQILKEHPVENSQLQNDRLFLYYLQNGRDMYTGEELDIDYLSQYDIDHIIPQAFIKDNSIDNRVLTSSKENRGKSDDVPSKDVVRKMKPYWSKLLSAKLITQRKFDNLTKAERGGLTDDDKAGFIKRQLVETRQITKHVARILDERFNTETDENNKKIRQVKIVTLKSNLVSNFRKEFELYKVREINDYHHAHDAYLNAVIGKALLGVYPQLEPEFVYGDYPHFHGHEENKATAKKFFYSNIMNFFKKDDVRTDKNGEIIWKKDEHISNIKKVLSYPQVNIVKKVEEQTIGQNGGLFDDNPKSPLEVIPSKLVPLKKALNPEKYGGYQKPTTAYPILLIVDTKQLIPISVMDKKRFEQNPVKFLKDKGYQQIEKNNFVKLPKYTLVDIGNGIKRLWASSKEVHKGNQLVVSKKSQDLLYHAHHLDNDYSNEYVKNHY

SEQ ID NO: 674 - protein, 1229 aa, Streptococcus mutans; identical to SEQ ID NO: 673

SEQ ID NO: 675 - protein, 1345 aa, Streptococcus mutans
MKKPYSIGLDIGTNSVGWAVVTDDYKVPAKKMKVLGNTDKSHIEKNLLGALLFDSGNTAEDRRLKRTARRRYTRRRNRILYLQEIFSEEMGKVDDSFFHRLEDSFLVTEDKRGERHPIFGNLEEEVKYHENFPTIYHLRQYLADNPEKVDLRLVYLALAHIIKFRGHFLIEGKFDTRNNDVQRLFQEFLAVYDNTFENSSLQEQNVQVEEILTDKISKSAKKDRVLKLFPNEKSNGRFAEFLKLIVGNQADFKKHFELEEKAPLQFSKDTYEEELEVLLAQIGDNYAELFLSAKKLYDSILLSGILTVTDVGTKAPLSASMIQRYNEHQMDLAQLKQFIRQKLSDKYNEVFSDVSKDGYAGYIDGKTNQEAFYKYLKGLLNKIEGSGYFLDKIEREDFLRKQRTFDNGSIPHQIHLQEMRAIIRRQAEFYPFLADNQDRIEKLLTFRIPYYVGPLARGKSDFAWLSRKSADKITPWNFDEIVDKESSAEAFINRMTNYDLYLPNQKVLPKHSLLYEKFTVYNELIKVKYKTEQGKTAFFDANMKQEIFDGVFKVYRKVTKDKLMDFLEKEFDEFRIVDLTGLDKENKVFNASYGTYHDLCKILDKDFLDNSKNEKILEDIVLTLTLFEDREMIRKRLENYSDLLTKEQVKKLERRHYTGWGRLSAELIHGIRNKESRKTILDYLIDDGNSNRNFMQLINDDALSFKEEIAKAQVIGETDNLNQVVSDIAGSPAIKKGILQSLKIVDELVKIMGHQPENIVVEMARENQFTNQGRRNSQQRLKGLTDSIKEFGSQILKEHPVENSQLQNDRLFLYYLQNGRDMYTGEELDIDYLSQYDIDHIIPQAFIKDNSIDNRVLTSSKENRGKSDDVPSKDVVRKMKSYWSKLLSAKLITQRKFDNLTKAERGGLTDDDKAGFIKRQLVETRQITKHVARILDERFNTETDENNKKIRQVKIVTLKSNLVSNFRKEFELYKVREINDYHHAHDAYLNAVIGKALLGVYPQLEPEFVYGDYPHFHGHKENKATAKKFFYSNIMNFFKKDDVRTDKNGEIIWKKDEHISNIKKVLSYPQVNIVKKVEEQTGGFSKESILPKGNSDKLIPRKTKKFYWDTKKYGGFDSPIVAYSILVIADIEKGKSKKLKTVKALVGVTIMEKMTFERDPVAFLERKGYRNVQEENIIKLPKYSLFKLENGRKRLLASARELQKGNEIVLPNHLGTLLYHAKNIHKVDEPKHLDYVDKHKDEFKELLDVVSNFSKKYTLAEGNLEKIKELYAQNNGEDLKELASSFINLLTFTAIGAPATFKFFDKNIDRKRYTSTTEILNATLIHQSITGLYETRIDLNKLGGD

SEQ ID NO: 676 - protein, 1350 aa, Streptococcus mutans
MKKPYSIGLDIGTNSVGWAVVTDDYKVPAKKMKVLGNTDKSHIEKNLLGALLFDSGNTAEDRRLKRTARRRYTRRRNRILYLQEIFSEEMGKVDDSFFHRLEDSFLVTEDKRGERHPIFGNLEEEVKYHENFPTIYHLRQYLADNPEKVDLRLVYLALAHIIKFRGHFLIEGKFDTRNNDVQRLFQEFLAVYDNTFENSSLQEQNVQVEEILTDKISKSAKKDRVLKLFPNEKSNGRFAEFLKLIVGNQADFKKHFELEEKAPLQFSKDTYEEELEVLLAQIGDNYAELFLSAKKLYDSILLSGILTVTDVSTKAPLSASMIQRYNEHQMDLTQLKQFIRQKLSDKYNEVFSDVSKDGYAGYIDGKTNQEAFYKYLKGLLNKIEGSGYFLDKIEREDFLRKQRTFDNGSIPHQIHLQEMRAIIRRQAEFYSFLADNQDRIEKILTFRIPYYVGPLARGKSDFAWLSRKSADKITPWNFDEIVDKESSAEAFINRMTNYDLYLPNQKVLPKHSLLYEKFTVYNELTKVKYKTEQGKTAFFDANMKQEIFDGVFKVYRKVTKDKLMDFLEKEFDEFRIVDLTGLDKENKAFNASYGTYHDLRKILDKDFLDNSKNEKILEDIVLTLTLFEDREMIRKRLENYSDLLTKEQVKKLERRHYTGWGRLSAELIHGIRNKESRKTILDYLIDDGNSNRNFMQLINDDALSFKEEIAKAQVIGETDNLNQVVSDIAGSPAIKKGILQSLKIVDELVKIMGHQPENIVVEMARENQFTNQGRRNSQQRLKGLTDSIKEFGSQILKEHPVENSQLQNDRLFLYYLQNGRDMYTGEELDIDYLSQYDIDHIIPQAFIKDNSIDNRVLTSSKENRGKSDDVPSEDVVNRMRPFWNKLLSSGLISQRKYNNLTKKELTLDDKAGFIKRQLVETRQITKHVARMLDERFNKEFDDNNKRIRKVKIVTLKSNLVSSFRKEFELYKVREINDYHHAHDAYLNAVVVKALLVKYSKLEPEFVYGEYPKYNSYRERKTATQKMFFYSNIMNMFKSKVKLADDQIVERPMIEVNDETGEIAWDKTKHITTVKKVLSYPQVNIVKKVEEQTIGQNGGLFDDNPKSPLEVIPSKLVPLKKALNPEKYGGYQKPTTAYPILLIVDTKQLIPISVMDKKRFEQNPVKFLKDKGYQQIEKNNFVKLPKYTLVDIGNGIKRLWASSKEVHKGNQLVVSKKSQDLLYHAHHLDNDYSNEYVKNHYQQFDILFNEITSFSKKCKLGKEHIQKIEEAYSKERDSASIEELADGFIKLLGFTQLGATSPFSFLGIKLNQKQYTGKKDYLLPCMEATLIHQSITGLYETRIDLSKLGGD

SEQ ID NO: 677 - protein, 1350 aa, Streptococcus mutans
MKKPYSIGLDIGTNSVGWAVVTDDYKVPAKKMKVLGNTDKSHIEKNLLGALLFDSGNTAEDRRLKRTARRRYTRRRNRILYLQEIFSEEMGKVDDSFFHRLEDSFLVTEDKRGERHPIFGNLEEEVKYHENFPTIYHLRQYLADNPEKVDLRLVYLALAHIIKFRGHFLIEGKFDTRNNDVQRLFQEFLAVYDNTFENSSLQEQNVQVEEILTDKISKSAKKDRVLKLFPNEKSNGRFAEFLKLIVGNQADFKKHFELEEKAPLQFSKDTYEEELEVLLAQIGDNYAELFLSAKKLYDSILLSGILTVTDVSTKAPLSASMIQRYNEHQMDLTQLKQFIRQKLSDKYNEVFSDVSKDGYAGYIDGKTNQEAFYKYLKGLLNKIEGSGYFLDKIEREDFLRKQRTFDNGSIPHQIHLQEMRAIIRRQAEFYPFLADNQDRIEKILTFRIPYYVGPLARGKSDFAWLSRKSADKITPWNFDEIVDKESSAEAFINRMTNYDLYLPNQKVLPKHSLLYEKFTVYNELTKVKYKTEQGKTAFFDANMKQEIFDGVFKVYRKVTKDKLMDFLEKEFDEFRIVDLTGLDKENKAFNASYGTYHDLRKILDKDFLDNSKNEKILEDIVLTLTLFEDREMIRKRLKNYSDLLTKEQLKKLERRHYTGWGRLSAELIHGIRNKESRKTILDYLIDDGNSNRNFMQLINDDALSFKEEIAKAQVIGETDNLNQVVSDIAGSPAIKKGILQSLKIVDELVKIMGHQPENIVVEMARENQFTNQGRQNSQQRLKGLTDSIKEFGSQILKEHPVENSQLQNDRLFLYYLQNGRDMYTGEELDIDYLSQYDIDHIIPQAFIKDNSIDNRVLTSSKENRGKSDDVPSEDVVNRMRPFWNKLLSSGLISQRKYNNLTKKELTLDDKAGFIKRQLVETRQITKHVARMLDERFNKEFDDNNKRICKVKIVTLKSNLVSSFRKEFELYKVREINDYHHAHDAYLNAVVVKALLVKYSKLEPEFVYGEYPKYNSYRERKTATQKMFFYSNIMNMFKSKVKLADDQIVERPMIEVNDETGEIAWDKTKHITTVKKVLSYPQVNIVKKVEEQTIGQNGGLFDDNPKSPLEVIPSKLVPLKKALNPEKYGGYQKPTTAYPILLIVDTKQLIPISVMDKKRFEQNPVKFLKDKGYQQIEKNNFVKLPKYTLVDIGNGIKRLWASSKEVHKGNQLVVSKKSQDLLYHAHHLDNDYSNEYVKNHYQQFDILFNEITSFSKKCKLGKEHIQKIEEAYSKERDSASIEELADGFIKLLGFTQLGATSPFSFLGIKLNQKQYTGKKDYLLPCMEATLIHQSITGLYETRIDLSKLGGD

SEQ ID NO: 678 - protein, 1345 aa, Streptococcus mutans; identical to SEQ ID NO: 675

SEQ ID NO: 679 - protein, 1350 aa, Streptococcus mutans; identical to SEQ ID NO: 676

SEQ ID NO: 680 - protein, 1350 aa, Streptococcus mutans; identical to SEQ ID NO: 677

SEQ ID NO: 681 - protein, 1345 aa, Streptococcus mutans
MKKPYSIGLDIGTNSVGWAVVTDDYKVPAKKMKVLGNTDKSHIKKNLLGALLFDSGNTAADRRLKRTARRRYTRRRNRILYLQEIFAEEMSKVDDSFFHRLEDSFLVTEDKRGERHPIFGNLEEEVKYHENFPTIYHLRQYLADNPEKVDLRLVYLALAHIIKFRGHFLIEGKFDTRNNDVQRLFQEFLAVYDNTFENSSLQEQNVQVEEILTDKISKSAKKDRVLKLFPNEKSNGRFAEFLKLIVGNQADFKKHFELEEKAPLQFSKDTYEEELEVLLTQIGDNYAELFLSAKKLYDSILLSGILTVTDVSTKAPLSASMIQRYNEHQMDLAQLKQFIRQKLSDKYNEVFSDVSKDGYAGYIDGKTNQEAFYKYLKGLLNKIEGSGYFLDKIEREDFLRKQRTFDNGSIPHQIHLQEMRAIIRRQAEFYPFLADNQDRIEKILTFRIPYYVGPLARGKSDFAWLSRKSADKITPWNFDEIVDKESSAEAFINRMTNYDLYLPNQKVLPKHSLLYEKFTVYNELTKVKYKTEQGKTAFFDANMKQEIFDGVFKVYRKVTKDKLMDFLEKEFDEFRIVDLTGLDKENKAFNASYGTYHDLRKILDKDFLDNSKNEKILEDIVLTLTLFEDREMIRKRLENYSDLLTKEQVKKLERRHYTGWGRLSAELIHGIRNKESRKTLLDYLIDDGNSNRNFMQLINDDALSFKEEIAKAQVIGETDNLNQVVSDIAGSPAIKKGILQSLKIVDELVKIMGHQPENIVVEMARENQFTNQGRRNSQQRLKGLTDSIKEFGSQILKEHPVENSQLQNDRLFLYYLQNGRDMYTGEELDIDYLSQYDIDHIIPQAFIKDNSIDNRVLTSSKENRGKSDDVPSKDVVRKMKPYWSKLLSAKLITQRKFDNLTKAERGGLTDDDKAGFIKRQLVETRQITKHVARILDERFNTETDENNKKIRQVKIVTLKSNLVSNFRKEFELYKVREINDYHHAHDAYLNAVIGKALLGVYPQLEPEFVYGDYPHFHGHEENKATAKKFFYSNIMNFFKKDDVRTDKNGEIIWKKDEHISNIKKVLSYPQVNIVKKVEEQTGGFSKESILPKGNSDKLIPRKTKKFYWDTKKYGGFDSPIVAYSILVIADIEKGKSKKLKTVKALVGVTIMEKMTFERDPVAFLERKGYRNVQEENIIKLPKYSLFKLENGRKRLLASARELQKGNEIVLPNHLGTLLYHAKNIHKVDEPKHLDYVDKHKDEFKELLDVVSNFSKKYTLAEGNLEKIKELYAQNNGEDLKELSSSFINLLTFTAIGAPAAFKFFDKNIDRKRYTSTTEILNATLIHQSITGLYETRIDLSKLGGD

SEQ ID NO: 682 - protein, 1345 aa, Streptococcus mutans
MKKPYSIGLDIGTNSVGWAVVTDDYKVPAKKMKVLGNTDKSHIKKNLLGALLFDSGNTAADRRLKRTARRRYTRRRNRILYLQEIFAEEMSKVDDSFFHRLEDSFLVTEDKRGERHPIFGNLEEEVKYHENFPTIYHLRQYLADNPEKVDLRLVYLALAHIIKFRGHFLIEGKFDTRNNDVQRLFQEFLAVYDNTFENSSLQEQNVQVEEILTDKISKSAKKDRVLKLFPNEKSNGRFAEFLKLIVGNQADFKKHFELEEKAPLQFSKDTYEEELEVLLAQIGDNYAELFLSAKKLYDSILLSGILTVTDVSTKAPLSASMIQRYNEHQMDLAQLKQFIRQKLSDKYNEVFSDVSKDGYAGYIDGKTNQEAFYKYLKGLLNKIEGSGYFLDKIEREDFLRKQRTFDNGSIPHQIHLQEMRAIIRRQAEFYPFLADNQDRIEKILTFRIPYYVGPLARGKSDFAWLSRKSADKITPWNFDEIVDKESSAEAFINRMTNYDLYLPNQKVLPKHSLLYEKFTVYNELTKVKYKTEQGKTAFFDANMKQEIFDGVFKVYRKVTKDKLMDFLEKEFDEFRIVDLTGLDKENKAFNASYGTYHDLRKILDKDFLDNSKNEKILEDIVLTLTLFEDREMIRKRLENYSDLLTKEQVKKLERRHYTGWGRLSAELIHGIRNKESRKTILDYLIDDGNSNRNFMQLINDDALSFKEEIAKAQVIGETDNLNQVVSDIAGSPAIKKGILQSLKIVDELVKIMGHQPENIVVEMARENQFTNQGRRNSQQRLKGLTDSIKEFGSQILKEHPVEHSQLQNDRLFLYYLQNGRDMYTGEELDIDYLSQYDIDHIIPQAFIKDNSIDNRVLTSSKENRGKSDDVPSKNVVRKMKSYWSKLLSAKLITQRKFDNLTKAERGGLTDDDKAGFIKRQLVETRQITKHVARILDERFHTETDENNKKIRQVKIVTLKSNLVSNFRKEFELYKVREINDYHHAHDAYLNAVIGKALLGVYPQLEPEFVYGDYPHFHGHKENKATAKKFFYSNIMNFFKKDDVRTDKNGEIIWKKDEHISNIKKVLSYPQVNIVKKVEEQTGGFSKESILPKGNSDKLIPRKTKKFYWDTKKYGGFDSPIVAYSILVIADIEKGKSKKLKTVKALVGVTIMEKMTFERDPVAFLERKGYRNVQEENIIKLPKYSLFKLENGRKRLLASARELQKGNEIVLPNHLGTLLYHAKNIHKVDEPKHLDYVDKHKDEFKELLDVVSNFSKKYTLAEGNLEKIKELYAQNNGEDLKELASSFINLLTFTAIGAPATFKFFDKNIDRKRYTSTTEILNATLIHQSITGLYETRIDLSKLGGD

SEQ ID NO: 683 - protein, 1345 aa, Streptococcus mutans
MKKPYSIGLDIGTNSVGWAVVTDDYKVPAKKMKVLGNTDKSHIKKNLLGALLFDSGNTAADRRLKRTARRRYTRRRNRILYLQEIFAEEMSKVDDSFFHRLEDSFLVTEDKRGERHPIFGNLEEEVKYHENFPTIYHLRQYLADNPEKVDLRLVYLALAHIIKFRGHFLIEGKFDTRNNDVQRLFQEFLAVYDNTFENSSLQEQNVQVEEILTDKISKSAKKDRVLKLFPNEKSNGRFAEFLKLIVGNQADFKKHFELEEKAPLQFSKDTYEEELEVLLAQIGDNYAELFLSAKKLYDSILLSGILTVTDVSTKAPLSASMIQRYNEHQMDLAQLKQFIRQKLSDKYNEVFSDVSKDGYAGYIDGKTNQEAFYKYLKGLLNKIEGSGYFLDKIEREDFLRKQRTFDNGSIPHQIHLQEMRAIIRRQAEFYPFLADNQDRIEKILTFRIPYYVGPLARGKSDFAWLSRKSADKITPWNFDEIVDKESSAEAFINRMTNYDLYLPNQKVLPKHSLLYEKFTVYNELTKVKYKTEQGKTAFFDANMKQEIFDGVFKVYRKVTKDKLMDFLEKEFDEFRIVDLTGLDKENKVFNASYGTYHDLCKILDKDFLDNSKNEKILEDIVLTLTLFEDREMIRKRLENYSDLLTKEQVKKLERRHYTGWGRLSAELIHGIRNKESRKTILDYLIDDGNSNRNFMQLINDDALSFKEEIAKAQVIGETDNLNQVVSDIAGSPAIKKGILQSLKIVDELVKIMGHQPENIVVEMARENQFTKQGRRNSQQRLKGLTDSIKEFGSQILKEHPVENSQLQNDRLFLYYLQNGRDMYTGEELDIDYLSQYDIDHIIPQAFIKDNSIDNRVLTSSKENRGKSDDVPSKDVVRKMKSYWSKLLSAKLITQRKFDNLTKAERGGLTDDDKAGFIKRQLVETRQITKHVARILDERFYTETDENNKKIRQVKIVTLKSNLVSNFRKEFELYKVREINDYHHAHDAYLNAVIGKALLGVYPQLEPEFVYGDYPHFHGHKENKATAKKFFYSNIMNFFKKDDVRTDKNGEIIWKKDEHISNIKKVLSYPQVNIVKKVEEQTGGFSKESILPKGNSDKLIPRKTKKFYWDTKKYGGFDSPIVAYSILVIADIEKGKSKKLKTVKALVGVTIMEKMTFERDPVAFLERKGYRNVQEENIIKLPKYSLFKLENGRKRLLASARELQKGNEIVLPNHLGTLLYHAKNIHKVDEPKHLDYVDKHKDEFKELLDVVSNFSKKYTLAEGNLEKIKELYAQNNGEDLKELASSFINLLTFTAIGAPATFKFFDKNIDRKRYTSTTEILNATLIHQSITGLYETRIDLSKLGGD

SEQ ID NO: 684 - protein, 1345 aa, Streptococcus mutans
MKKPYSIGLDIGTNSVGWAVVTDDYKVPAKKMKVLGNTDKSHIKKNLLGALLFDSGNTAADRRLKRTARRRYTRRRNRILYLQEIFAEEMSKVDDSFFHRLEDSFLVTEDKRGERHPIFGNLEEEVKYHENFPTIYHLRQYLADNPEKVDLRLVYLALAHIIKFRGHFLIEGKFDTRNNDVQRLFQEFLAVYDNTFENSSLQEQNVQVEEILTDKISKSAKKDRVLKLFPNEKSNGRFAEFLKLIVGNQADFKKHFELEEKAPLQFSKDTYEEELEVLLAQIGDNYAELFLSAKKLYDSILLSGILTVTDVSTKAPLSASMIQRYNEHQMDLAQLKQFIRQKLSDKYNEVFSDVSKDGYAGYIDGKTNQEAFYKYLKGLLNKIEGSGYFLDKIEREDFLRKQRTFDNGSIPHQIHLQEMRAIIRRQAEFYPFLADNQDRIEKILTFRIPYYVGPLARGKSDFAWLSRKSADKITPWNFDEIVDKESSAEAFINRMTNYDLYLPNQKVLPKHSLLYEKFTVYNELTKVKYKTEQGKTAFFDANMKQEIFDGVFKVYRKVTKDKLMDFLEKEFDEFRIVDLTGLDKENKAFNASYGTYHDLRKILDKDFLDNSKNEKILEDIVLTLTLFEDREMIRKRLENYSDLLTKEQVKKLERRHYTGWGRLSAELIHGIRNKESRKTILDYLIDDGNSNRNFMQLINDDALSFKEEIAKAQVIGETDNLNQVVSDIAGSPAIKKGILQSLKIVDELVKIMGHQPENIVVEMARENQFTNQGRRNSQQRLKGLTDSIKEFGSQILKEHPVENSQLQNDRLFLYYLQNGRDMYTGEELDIDYLSQYDIDHIIPQAFIKDNSIDNRVLTSSKENRGKSDDVPSKNVVRKMKSYWSKLLSAKLITQRKFDNLTKAERGGLTDDDKAGFIKRQLVETRQITKHVARILDERFHTETDENNKKIRQVKIVTLKSNLVSNFRKEFELYKVREINDYHHAHDAYLNAVIGKALLGVYPQLEPEFVYGDYPHFHGHKENKATAKKFFYSNIMNFFKKDDVRTDKNGEIIWKKDEHISNIKKVLSYPQVNIVKKVEEQTGGFSKESILPKGNSDKLIPRKTKKFYWDTKKYGGFDSPIVAYSILVIADIEKGKSKKLKTVKALVGVTIMEKMTFERDPVAFLERKGYRNVQEENIIKLPKYSLFKLENGRKRLLASARELQKGNEIVLPNHLGTLLYHAKNIHKVDEPKHLDYVDKHKDEFKELLDVVSNFSKKYTLAEGNLEKIKELYAQNNGEDLKELSSSFINLLTFTAIGAPAAFKFFDKNIDRKRYTSTTEILNATLIHQSITGLYETRIDLSKLGGD

SEQ ID NO: 685 - protein, 1345 aa, Streptococcus mutans; identical to SEQ ID NO: 681

SEQ ID NO: 686 - protein, 1345 aa, Streptococcus mutans; identical to SEQ ID NO: 682

SEQ ID NO: 687 - protein, 1345 aa, Streptococcus mutans; identical to SEQ ID NO: 683

SEQ ID NO: 688 - protein, 1345 aa, Streptococcus mutans; identical to SEQ ID NO: 684

SEQ ID NO: 689 - protein, 1345 aa, Streptococcus mutans; identical to SEQ ID NO: 682

SEQ ID NO: 690 - protein, 1345 aa, Streptococcus mutans; identical to SEQ ID NO: 682

SEQ ID NO: 691 - protein, 1345 aa, Streptococcus mutans; identical to SEQ ID NO: 682

SEQ ID NO: 692 - protein, 1345 aa, Streptococcus mutans; identical to SEQ ID NO: 682

SEQ ID NO: 693 - protein, 1359 aa, Streptococcus mutans
MKKPYSIGLDIGTNSVGWAVVTDDYKVPAKKMKVLGNTDKSHIKKNLLGALLFDSGNTAEDRRLKRTARRRYTRRRNRILYLQEIFAEEMMQVDESFFQRLDDSFLVEEDKRGSRYPIFGTLKEEKKYHKEFKTIYHLREKLANSTEKADLRLVYLSLAHMIKFRGHFLIEGQLKAENTNVQALFKDFVEVYDKTVEESHLSEMTVDALSILTEKVSKSRRLENLVECYPTEKKNTLFGNLIALSLGLQPNFKTNFQLSEDAKLQFSKDTYEEDLEGLLGEIGDEYADLFASAKNLYDAILLSGILAVDDNTTKAPLSASMVKRYKEHKEELAAFKRFIKEKLPKKYEEIFKDDTKNGYAGYVGADKKLRKRSGKLATEEEFYKYVKGILNKVEGADVWLDKIDREDFLRKQRTFDNGSIPHQIHLQEMHAILRRQGEHYPFLKENQDKIEKILTFRIPYYVGPLVRKGSRFAWAEYKADEKITPWNFDDILDKEKSAEKFITRMTLNDLYLPEEKVLPKHSLLYETFTVYNELTKVKYVNEQGEAKFFDANMKQEIFDHVFKENRKVTKDKLLNYLNKEFEEFRIVNLTGLDKENKVFNSSLGTYHDLRKILNKSFLDNKENEQIIEDIIQTLTLFEDREMIRQRLQKYSDIFTKAQLKKLERRHYTGWGRLSYKLINGIRDKQSNKTILGYLIDDGYSNRNFMQLINDDALSFKEEIAKAQVIGEMDGLNQVVSDIAGSPAIKKGILQSLKIVDELVKVMGHNPANIVIEMARENQTTAKGRRSSQKRYKRLEEAIKNLDHDLNHKILKEHPTDNQALQNDRLFLYYLQNGRDMYTEDPLDINRLSDYDIDHIIPQAFIKDNSIDNRVLTRSDKNRGKSDDVPSEEVVHKMKPFWSKLLSAKLITQRKFDNLTKAERGGLTDDDKAGFIKRQLVETRQITKHVARILDERFNTETDENNKKIRQVKIVTLKSNLVSNFRKEFELYKVREINDYHHAHDAYLNAVIGKALLGVYPQLEPEFVYGDYPHFHGHKENKATAKKFFYSNIMNFFKKGDVRTDKNGEIIWKKDEHISNIKKVLSYPQVNIVKKVEEQTGGFSKESILPKGNSDKLIPRKTKKFYWDTKKYGGFDSPIVAYSILVIADIEKGKSKKLKTVKALVGVTIMEKMTFERDPVAFLERKGYRNVQEENIIKLPKYSLFKLENGRKRLLASARELQKGNEIVLPNHLETLLYHAKNIHKVDEPKHLDYVDKHKDEFKELLDVVSNFSKKYTLAEGNLEKIKELYAQNNGEDLKELASSFINLLTFTAIGAPAAFKFFDKNIDRKRYTSTTEILNATLIHQSITGLYETRIDLNKLGGD

SEQ ID NO: 694 - protein, 1359 aa, Streptococcus mutans; identical to SEQ ID NO: 693

SEQ ID NO: 695 - protein, 1355 aa, Streptococcus mutans
MKKPYSIGLDIGTNSVGWAVVTDDYKVPAKKMKVLGNTDKSHIKKNLLGALLFDSGNTAEDRRLKRTARRRYTRRRNRILYLQEIFAEEMSKVDDSFFHRLDESFLTDDDKNFDSHPIFGNKAEEDAYHQKFPTIYHLRKHLADSTEKADLRLVYLALAHMIKFRGHFLIEGELNAENTDVQKLFADFVGVYDRTFDDSHLSEITVDASSILTEKISKSRRLEKLINNYPKEKKNTLFGNLIALSLGLQPNFKTNFKLSEDAKLQFSKDTYEEDLEELLGKIGDDYADLFTLAKNLYDAILLSGILTADDSSTKAPLSASMIKRYAEHHEDLEKLKEFIKANKPELYHDIFKDETKNGYAGYIENGVKQDEFYKYLKNTLSKITGSDYFLDQIEREDFLRKQRTFDNGSIPHQIHLQEMHAILRRQGDYYPFLKENQDRIEKILTFRIPYYVGPLARKNSRFAWAEYHSDEAVTPWNFDQVIDKESSAQAFIEHMTNNDLYLPNEKVLPKHSPLYEKYTVYNELTKIKYVTEIGEAKFFDANLKQEIFDGLFKHERKVTKKKLRTFLDKNFDEFRIVDIQGLDKETETFNASYATYQDLLKVIKDKVFMDNPENAEILENIVLTLTLFEDREMIKQRLAKYADVFDKKVIDQLARRHYTGWGRLSAKLLNGIRDKQSCKTIMDYLIDDAQSNRNLMQLITDDNLTFKDDIVKAQYVDNSDDLHQVVQSLAGSPAIKKGILQSLKIVDELVKVMGKEPEQIVVEMARENQTTAKGRRNSQQRYKRLKEAIKSLDRDLNHKILKEHPTDNQALQNNRLFLYYLQNGRDMYTGESLDINRLSDYDIDHVIPQAFIKDNSIDNRVLTSSKANRGKSDDVPSEDVVNRMRPFWNKLLSSGLISQRKYNNLTKKELTLDDKAGFIKRQLVETRQITKHVARMLDERFNKEFDDNNKRIRRVKIVTLKSNLVSSFRKEFELYKVREINDYHHAHDAYLNAVVVKALLVKYPKLEPEFVYGEYPKYNSYRERKTATQKMFFYSNIMNMFKSKVKLADDQIVERPMIEVNDETGEIAWDKTKHITTVKKVLSYPQVNIVKKVEEQTIGQNGGLFDDNPKSPLEVIPSKLVPLKKALNPEKYGGYQKPTTAYPILLIVDTKQLIPISVMDKKRFEQNPVKFLKDKGYQQIEKNNFVKLPKYTLVDIGNGIKRLWASSKEVHKGNQLVVSKKSQDLLYHAHHLDNDYSNEYVKNHYQQFDILFNEITSFSKKCKLGKEHIQKIEEAYSKERDFASIEELADGFIKLLGFTQLGATSPFSFLGIKLNQKQYTGKKDYLLPCMEATLIHQSITGLYETRIDLSKLGGD

SEQ ID NO: 696 - protein, 1355 aa, Streptococcus mutans; identical to SEQ ID NO: 695

SEQ ID NO: 697 - protein, 1345 aa, Streptococcus mutans
MKKPYSIGLDIGTNSVGWAVVTDDYKVPAKKMKVLGNTDKSHIKKNLLGALLFDSGNTAEDRRLKRTARRRYTRRRNRILYLQEIFSEEMDKVDDSFFHRLEDSFLVTEDKRGERHPIFGNLEEEVKYHENFPTIYHLRQYLADNPEKVDLRLVYLALAHIIKFRGHFLIEGKFDTRNNDVQRLFQEFLAVYDNTFENSSLQEQNVQVEEILTDKISKSAKKDRVLKLFPNEKSNGRFAEFLKLIVGNQADFKKHFELEEKAPLQFSKDTYEEELEVLLAQIGDNYAELFLSAKKLYDSILLSGILTVTDVSTKAPLSASMIQRYNEHQMDLAQLKQFIRQKLSDKYNEVFSDVSKDGYAGYIDGKTNQEAFYKYLKGLLNKIEGSGYFLDKIEREDFLRKQRTFDNGSIPHQIHLQEMRAIIRRQAEFYPFLADNQDRIEKILTFRIPYYVGPLARGKSDFAWLSRKSADKITPWNFDEIVDKESSAEAFINRMTNYDLYLPNQKVLPKHSLLYEKFTVYNELTKVKYKTEQGKTAFFDANMKQEIFDGVFKVYRKVTKDKLMDFLEKEFDEFRIVDLTGLDKENKVFNASYGTYHDLCKILDKDFLDNSKNEKILEDIVLTLTLFEDREMIRKRLENYSDLLTKEQVKKLERRHYTGWGRLSAELIHGIRNKESRKTILDYLIDDGNSNRNFMQLINDDALSFKEEIAKAQVIGETDNLNQVVSDIAGSPAIKKGILQSLKIVDELVKIMGHQPENIVVEMARENQFTKQGRRNSQQRLKGLTDSIKEFGSQILKEHPVENSQLQNDRLFLYYLQNGRDMYTGEELDIDYLSQYDIDHIIPQAFIKDNSIDNRVLTSSKENRGKSDDVPSKDVVRKMKSYWSKLLSAKLITQRKFDNLTKAERGGLTDDDKAGFIKRQLVETRQITKHVARILDERFYTETDENNKKIRQVKIVTLKSNLVSNFRKEFELYKVREINDYHHAHDAYLNAVIGKALLGVYPQLEPEFVYGDYPHFHGHKENKATAKKFFYSNIMNFFKKDDVRTDKNGEIIWKKDEHISNIKKVLSYPQVNIVKKVEEQTGGFSKESILPKGNSDKLIPRKTKKFYWDTKKYGGFDSPIVAYSILVIADIEKGKSKKLKTVKALVGVTIMEKMTFERDPVAFLERKGYRNVQEENIIKLPKYSLFKLENGRKRLLASARELQKGNEIVLPNHLGTLLYHAKNIHKVDEPKHLDYVDKHKDEFKELLDVVSNFSKKYTLAEGNLEKIKELYAQNNGEDLKELASSFINLLTFTAIGAPATFKFFDKNIDRKRYTSTTEILNATLIHQSITGLYETRIDLSKLGGD

SEQ ID NO: 698 - protein, 1345 aa, Streptococcus mutans; identical to SEQ ID NO: 697

SEQ ID NO: 699 - protein, 1345 aa, Streptococcus mutans
MKKPYSIGLDIGTNSVGWAVVTDDYKVPAKKMKVLGNTDKSHIKKNLLGALLFDSGNTAEDRRLKRTARRRYTRRRNRILYLQEIFSEEMGKVDDSFFHRLDESFLTDDDKNFDSHPIFGNKAEEDAYHQKFPTIYHLRKHLADSTEKADLRLVYLALAHMIKFRGHFLIEGELNAENTDVQKLFADFVGVYDRTFDDSHLSEITVDASSILTEKISKSRRLEKLINNYPKEKKNTLFGNLIALSLGLQPNFKTNFKLSEDAKLQFSKDTYEEELEVLLAQIGDNYAELFLSAKKLYDSILLSGILTVTDVSTKAPLSASMIQRYNEHQMDLAQLKQFIRQKLSDKYNEVFSDVSKDGYAGYIDGKTNQEAFYKYLKGLLNKIEGSGYFLDKIEREDFLRKQRTFDNGSIPHQIHLQEMRAIIRRQAEFYPFLADNQDRIEKILTFRIPYYVGPLARGKSDFAWLSRKSADKITPWNFDEIVDKESSVEAFINRMTNYDLYLPNQKVLPKHSLLYEKFTVYNELTKVKYKTEQGKTAFFDANMKQEIFDGVFKVYRKVTKDKLMDFLEKEFDEFRIVDLTGLDKENKAFNASYGTYHDLRKILDKDFLDNSKNEKILEDIVLTLTLFEDREMIRKRLKNYSDLLTKEQLKKLERRHYTGWGRLSAELIHGIRNKESRKTILDYLIDDGNSNRNFMQLINDDALSFKEEIAKAQVIGETDNLNQVVSDIAGSPAIKKGILQSLKIVDELVKIMGHQPENIVVEMARENQFTNQGRRNSQQRLKGLTDSIKEFGSQILKEHPVENSQLQNDRLFLYYLQNGRDMYTGEELDIDYLSQYDIDHIIPQAFIKDNSIDNRVLTSSKENRGKSDDVPSKDVVRKMKSYWSKLLSAKLITQRKFDNLTKGERGGLTDDDKAGFIKRQLVETRQITKHVARILDERFNTETDENNKKIRQVKIVTLKSNLVSNFRKEFELYKVREINDYHHAHDAYLNAVIGKALLGVYPQLEPEFVYGDYPHFHGHKENKATAKKFFYSNIMNFFKKDDVRTDKNGEIIWKKDEYISNIKKVLSYPQVNIVKKVEEQTGGFSKESILPKGDSDKLIPRKTKKFYWDTKKYGGFDSPIVAYSILVIADIEKGKSKKLKTVKALVGVTIMEKMTFERDPVAFLERKGYRNVQEENIIKLPKYSLFKLENGRKRLLASARELQKGNEIVLPNHLGTLLYHAKNIHKVDEPKHLDYVDKHKDEFKELLDVVSNFSKKYTLAEGNLEKIKELYAQNNGEDLKELASSFINLLTFTAIGAPATFKFFDKNIDRKRYTSTTEILNATLIHQSITGLYETRIDLSKLGGD

SEQ ID NO: 700 - protein, 1345 aa, Streptococcus mutans
MKKPYSIGLDIGTNSVGWAVVTDDYKVPAKKMKVLGNTDKSHIKKNLLGALLFDSGNTAEDRRLKRTARRRYTRRRNRILYLQEIFSEEMGKVDDSFFHRLDESFLTDDDKNFDSYPIFGNKAEEDAYHQKFPTIYHLRKHLADSTEKADLRLVYLALAHMIKFRGHFLIEGELNAENTDVQKLFADFVGVYDRTFDDSHLSEITVDASSILTEKISKSRRLEKLINNYPKEKKNTLFRNLVALSLGLQPNFKTNFKLSEDAKLQFSKDTYEEDLEELLGKIGDDYADLFTLAKNLYDAILLSGILTADDSSTKAPLSASMIKRYAEHHEDLEKLKEFIKANKPELYHDIFKDETKNGYAGYIENGVKQDEFYKYLKNTLSKIAGSDYFLDKIEREDFLRKQRTFDNGSIPHQIHLQEMHAILRRQGDYYPFLKENQDRIEKILTFRIPYYVGPLARGKSDFAWLSRKSADKITPWNFDEIVDKESSVEAFINRMTNYDLYLPNQKVLPKHSLLYEKFTVYNELTKVKYKTEQGKTAFFDANMKQEIFDGVFKVYRKVTKDKLMDFLEKEFDEFRIVDLTGLDKENKAFNASYGTYHDLRKILDKDFLDNSKNEKILEDIVLTLTLFEDREMIRKRLKNYSDLLTKEQLKKLERRHYTGWGRLSAELIHGIRNKESRKTILDYLIDDGNSNRNFMQLINDDALSFKEEIAKAQVIGETDNLNQVVSDIAGSPAIKKGILQSLKIVDELVKIMGHQPENIVVEMARENQFTNQGRRNSQQRLKGLTDSIKEFGSQILKEHPVENSQLQNDRLFLYYLQNGRDMYTGEELDIDYLSQYDIDHIIPQAFIKDNSIDNRVLTSSKENRGKSDDVPSKDVVRKMKSYWSKLLSAKLITQRKFDNLTKGERGGLTDDDKAGFIKRQLVETRQITKHVARILDERFNTETDENNKKIRQVKIVTLKSNLVSNFRKEFELYKVREINDYHHAHDAYLNAVIGKALLGVYPQLEPEFVYGDYPHFHGHKENKATAKKFFYSNIMNFFKKDDVRTDKNGEIIWKKDEYISNIKKVLSYPQVNIVKKVEEQTGGFSKESILPKGDSDKLIPRKTKKFYWDTKKYGGFDSPIVAYSILVIADIEKGKSKKLKTVKALVGVTIMEKMTFERDPVAFLERKGYRNVQEENIIKLPKYSLFKLENGRKRLLASARELQKGNEIVLPNHLGTLLYHAKNIHKVDEPKHLDYVDKHKDEFKELLDVVSNFSKKYTLAEGNLEKIKELYAQNNGEDLKELASSFINLLTFTAIGAPATFKFFDKNIDRKRYTSTTEILNATLIHQSITGLYETRIDLSKLGGD

SEQ ID NO: 701 - protein, 1345 aa, Streptococcus mutans; identical to SEQ ID NO: 700

SEQ ID NO: 702 - protein, 1345 aa, Streptococcus mutans
MKKPYSIGLDIGTNSVGWAVVTDDYKVPAKKMKVLGNTDKSHIKKNLLGALLFDSGNTAEDRRLKRTARRRYTRRRNRILYLQEIFSEEMGKVDDSFFHRLEDSFLVTEDKRGERHPIFGNLEEEVKYHENFPTIYHLRQYLADNPEKTDLRLVYLALAHIIKFGGHFLIEGKFDTRNNDVQRLFQEFLAVYDNTFENSSLQEQNVQVEEILTDKISKSAKKDRVLKLFPNEKSNGRFAEFLKLIVGNQADFKKHFELEEKAPLQFSKDIYEEELEVLLAQIGDNYAELFLSAKKLYDSILLSGILTVTDVSTKAPLSASMIQRYNEHQMDLAQLKQFIRQKLSDKYNEVFSDVSKDGYAGYIDGKTNQEAFYKYLKGLLNKIEGSGYFLDKIEREDFLRKQRTFDNGSIPHQIHLQEMRAIIRRQAEFYPFLADNQDRIEKILTFRIPYYVGPLARGKSDFAWLSRKSADKITPWNFDEIVDKESSVEAFINRMTNYDLYLPNQKVLPKHSLLYEKFTVYNELTKVKYKTEQGKTAFFDANMKQEIFDGVFKVYRKVTKDKLMDFLEKEFDEFRIVDLTGLDKENKAFNASYGTYHDLRKILDKDFLDNSKNEKILEDIVLTLTLFEDREMIRKRLKNYSDLLTKEQLKKLERRHYTGWGRLSAELIHGIRNKESRKTILDYLIDDGNSNRNFMQLINDDALSFKEEIAKAQVIGETDNLNQVVSDIAGSPAIKKGILQSLKIVDELVKIMGHQPENIVVEMARENQFTNQGRRNSQQRLKGLTDSIKEFGSQILKEHPVENSQLQNDRLFLYYLQNGRDMYTGEELDIDYLSQYDIDHIIPQAFIKDNSIDNRVLTSSKENRGKSDDVPSKNVVRKMKSYWSKLLSAKLITQRKFDNLTKAERGGLTDDDKAGFIKRQLVETRQITKHVARILDERFHTETDENNKKIRQVKIVTLKSNLVSNFRKEFELYKVREINDYHHAHDAYLNAVIGKALLGVYPQLEPEFVYGDYPHFHGHKENKATAKKFFYSNIMNFFKKDDVRTDKNGEIIWKKDEHISNIKKVLSYPQVNIVKKVEEQTGGFSKESILPKGNSDKLIPRKTKKFYWDTKKYGGFDSPIVAYSILVIADIEKGKSKKLKTVKALVGVTIMEKMTFERDPVAFLERKGYRNVQEENIIKLPKYSLFKLENGRKRLLASARELQKGNEIVLPNHLGTLLYHAKNIHKVDEPKHLDYVDKHKDEFKELLDVVSNFSKKYTLAEGNLEKIKELYAQNNGEDLKELASSFINLLTFTAIGAPATFKFFDKNIDRKRYTSTTEILNATLIHQSITGLYETRIDLSKLGGD

SEQ ID NO: 703 - protein, 1345 aa, Streptococcus mutans; identical to SEQ ID NO: 702

SEQ ID NO: 704 - protein, 1345 aa, Streptococcus mutans
MKKPYSIGLDIGTNSVGWAVVTDDYKVPAKKMKVLGNTDKSHIKKNLLGALLFDSGNTAEDRRLKRTARRRYTRRRNRILYLQEIFSEEMGKVDDSFFHRLEDSFLVTEDKRGERHPIFGNLEEEVKYHENFPTIYHLRQYLADNPEKTDLRLVYLALAHIIKFRGHFLIEGKFDTRNNDVQRLFQEFLAVYDNTFENSSLQEQNVQVEEILTDKISKSAKKDRVLKLFPNEKSNGRFAEFLKLIVGNQADFKKHFELEEKAPLQFSKDIYEEELEVLLAQIGDNYAELFLSAKKLYDSILLSGILTVTDVSTKAPLSASMIQRYNEHQMDLAQLKQFIRQKLSDKYNEVFSDVSKDGYAGYIDGKTNQEAFYKYLKGLLNKIEGSGYFLDKIEREDFLRKQRTFDNGSIPHQIHLQEMRAIIRRQAEFYPFLADNQDRIEKILTFRIPYYVGPLARGKSDFAWLSRKSADKITPWNFDEIVDKESSVEAFINRMTNYDLYLPNQKVLPKHSLLYEKFTVYNELTKVKYKTEQGKTAFFDANMKQEIFDGVFKVYRKVTKDKLMDFLEKEFDEFRIVDLTGLDKENKAFNASYGTYHDLRKILDKDFLDNSKNEKILEDIVLTLTLFEDREMIRKRLKNYSDLLTKEQLKKLERRHYTGWGRLSAELIHGIRNKESRKTILDYLIDDGNSNRNFMQLINDDALSFKEEIAKAQVIGETDNLNQVVSDIAGSPAIKKGILQSLKIVDELVKIMGHQPENIVVEMARENQFTNQGRRNSQQRLKGLTDSIKEFGSQILKEHPVENSQLQNDRLFLYYLQNGRDMYTGEELDIDYLSQYDIDHIIPQAFIKDNSIDNRVLTSSKENRGKSDDVPSKNVVRKMKSYWSKLLSAKLITQRKFDNLTKAERGGLTDDDKAGFIKRQLVETRQITKHVARILDERFHTETDENNKKIRQVKIVTLKSNLVSNFRKEFELYKVREINDYHHAHDAYLNAVIGKALLGVYPQLEPEFVYGDYPHFHGHKENKATAKKFFYSNIMNFFKKDDVRTDKNGEIIWKKDEHISNIKKVLSYPQVNIVKKVEEQTGGFSKESILPKGNSDKLIPRKTKKFYWDTKKYGGFDSPIVAYSILVIADIEKGKSKKLKTVKALVGVTIMEKMTFERDPVAFLERKGYRNVQEENIIKLPKYSLFKLENGRKRLLASARELQKGNEIVLPNHLGTLLYHAKNIHKVDEPKHLDYVDKHKDEFKELLDVVSNFSKKYTLAEGNLEKIKELYAQNNGEDLKELASSFINLLTFTAIGAPATFKFFDKNIDRKRYTSTTEILNATLIHQSITGLYETRIDLSKLGGD

SEQ ID NO: 705 - protein, 1345 aa, Streptococcus mutans
MKKPYSIGLDIGTNSVGWAVVTDDYKVPAKKMKVLGNTDKSHIKKNLLGALLFDSGNTAEDRRLKRTARRRYTRRRNRILYLQEIFSEEMGKVDDSFFHRLEDSFLVTEDKRGERHPIFGNLEEEVKYHENFPTIYHLRQYLADNPEKTDLRLVYLALAHIIKFRGHFLIEGKFDTRNNDVQRLFQEFLAVYDNTFENSSLQEQNVQVEEILTDKISKSAKKDRVLKLFPNEKSNGRFAEFLKLIVGNQADFKKHFELEEKAPLQFSKDIYEEELEVLLAQIGDNYAELFLSAKKLYDSILLSGILTVTDVSTKAPLSASMIQRYNEHQMDLAQLKQFIRQKLSDKYNEVFSDVSKDGYAGYIDGKTNQEAFYKYLKGLLNKIEGSGYFLDKIEREDFLRKQRTFDNGSIPHQIHLQEMRAIIRRQAEFYPFLADNQDRIEKILTFRIPYYVGPLARGKSDFAWLSRKSADKITPWNFDEIVDKESSVEAFINRMTNYDLYLPNQKVLPKHSLLYEKFTVYNELTKVKYKTEQGKTAFFDANMKQEIFDGVFKVYRKVTKDKLMDFLEKEFDEFRIVDLTGLDKENKAFNASYGTYHDLRKILDKDFLDNSKNEKILEDIVLTLTLFEDREMIRKRLKNYSDLLTKEQLKKLERRHYTGWGRLSAELIHGIRNKESRKTILDYLIDDGNSNRNFMQLINDDALSFKEEIAKAQVIGETDNLNQVVSDIAGSPAIKKGILQSLKIVDELVKIMGHQPENIVVEMARENQFTNQGRRNSQQRLKGLTDSIKEFGSQILKEHPVENSQLQNDRLFLYYLQNGRDMYTGEELDIDYLSQYDIDHIIPQAFIKDNSIDNRVLTSSKENRGKSDDVPSKDVVRKMKSYWSKLLSAKLITQRKFDNLTKAERGGLTDDDKAGFIKRQLVETRQITKHVARILDERFNTETDENNKKIRQVKIVTLKSNLVSNFRKEFELYKVREINDYHHAHDAYLNAVIGKALLGVYPQLEPEFVYGDYPHFHGHKENKATAKKFFYSNIMNFFKKDDVRTDKNGEIIWKKDEHISNIKKVLSYPQVNIVKKVEEQTGGFSKESILPKGNSYKLIPRKTKKFYWDTKKYGGFDSPIVAYSILVIADIEKGKSKKLKTVKALVGVTIMEKMTFERDPVAFLERKGYRNVQEENIIKLPKYSLFKLENGRKRLLASARELQKGNEIVLPNHLGTLLYHAKNIHKVDEPKHLDYVDKHKDEFKELLDVVSNFSKKYTLAEGNLEKIKELYAQNNGEDLKELASSFINLLTFTAIGAPAAFKFFDKNIDRKRYTSTTEILNATLIHQSITGLYETRIDLSKLGGD

SEQ ID NO: 706 - protein, 1345 aa, Streptococcus mutans
MKKPYSIGLDIGTNSVGWAVVTDDYKVPAKKMKVLGNTDKSHIKKNLLGALLFDSGNTAEDRRLKRTARRRYTRRRNRILYLQEIFSEEMGKVDDSFFHRLEDSFLVTEDKRGERHPIFGNLEEEVKYHENFPTIYHLRQYLADNPEKTDLRLVYLALAHIIKFRGHFLIEGKFDTRNNDVQRLFQEFLAVYDNTFENSSLQEQNVQVEEILTDKISKSAKKDRVLKLFPNEKSNGRFAEFLKLIVGNQADFKKHFELEEKAPLQFSKDIYEEELEVLLAQIGDNYAELFLSAKKLYDSILLSGILTVTDVSTKAPLSASMIQRYNEHQMDLAQLKQFIRQKLSDKYNEVFSDVSKDGYAGYIDGKTNQEAFYKYLKGLLNKIEGSGYFLDKIEREDFLRKQRTFDNGSIPHQIHLQEMRAIIRRQAEFYPFLADNQDRIEKILTFRIPYYVGPLARGKSDFAWLSRKSADKITPWNFDEIVDKESSAEAFINRMTNYDLYLPNQKVLPKHSLLYEKFTVYNELTKVKYKTEQGKTAFFDANMKQEIFDGVFKVYRKVTKDKLMDFLEKEFDEFRIVDLTGLDKENKAFNASYGTYHDLRKILDKDFLDNSKNEKILEDIVLTLTLFEDREMIRKRLKNYSDLLTKEQLKKLERRHYTGWGRLSAELIHGIRNKESRKTILDYLIDDGNSNRNFMQLINDDALSFKEEIAKAQVIGETDNLNQVVSDIAGSLAIKKGILQSLKIVDELVKIMGHQPENIVVEMARENQFTNQGRRNSQQRLKGLTDSIKEFGSQILKEHPVENSQLQNDRLFLYYLQNGRDMYTGEELDIDYLSQYDIDHIIPQAFIKDNSIDNRVLTSSKENRGKSDDVPSKDVVRKMKSYWSKLLSAKLITQRKFDNLTKGERGGLTDDDKAGFIKRQLVETRQITKHVARILDERFNTETDENNKKIRQVKIVTLKSNLVSNFRKEFELYKVREINDYHHAHDAYLNAVIGKALLGVYPQLEPEFVYGDYPHFHGHKENKATAKKFFYSNIMNFFKKDDVRTDKNGEIIWKKDEYISNIKKVLSYPQVNIVKKVEEQTGGFFKESILPKGDSDKLIPRKTKKFYWDTKKYGGFDSPIVAYSILVIADIEKGKSKKLKTVKALVGVTIMEKMTFERDPVAFLERKGYRNVQEENIIKLPKYSLFKLENGRKRLLASARELQKGNEIVLPNHLGTLLYHAKNIHKVDEPKHLDYVDKHKDEFKELLDVVSNFSKKYTLAEGNLEKIKELYAQNNGEDLKELASSFINLLTFTAIGAPATFKFFDKNIDRKRYTSTTEILNATLIHQSITGLYETRIDLSKLGGD

SEQ ID NO: 707 - protein, 1345 aa, Streptococcus mutans
MKKPYSIGLDIGTNSVGWAVVTDDYKVPAKKMKVLGNTDKSHIKKNLLGALLFDSGNTAEDRRLKRTARRRYTRRRNRILYLQEIFSEEMGKVDDSFFHRLEDSFLVTEDKRGERHPIFGNLEEEVKYHENFPTIYHLRQYLADNPEKTDLRLVYLALAHIIKFRGHFLIEGKFDTRNNDVQRLFQEFLAVYDNTFENSSLQEQNVQVEEILTDKISKSAKKDRVLKLFPNEKSNGRFAEFLKLIVGNQADFKKHFELEEKAPLQFSKDIYEEELEVLLAQIGDNYAELFLSAKKLYDSILLSGILTVTDVSTKAPLSASMIQRYNEHQMDLAQLKQFIRQKLSDKYNEVFSDVSKDGYAGYIDGKTNQEAFYKYLKGLLNKIEGSGYFLDKIEREDFLRKQRTFDNGSIPHQIHLQEMRAIIRRQAEFYPFLADNQDRIEKILTFRIPYYVGPLARGKSDFAWLSRKSADKITPWNFDEIVDKESSVEAFINRMTNYDLYLPNQKVLPKHSLLYEKFTVYNELTKVKYKTEQGKTAFFDANMKQEIFDGVFKVYRKVTKDKLMDFLEKEFDEFRIVDLTGLDKENKAFNASYGTYHDLRKILDKDFLDNSKNEKILEDIVLTLTLFEDREMIRKRLKNYSDLLTKEQLKKLERRHYTGWGRLSAELIHGIRNKESRKTILDYLIDDGNSNRNFMQLINDDALSFKEEIAKAQVIGETDNLNQVVSDIAGSPAIKKGILQSLKIVDELVKIMGHQPENIVVEMARENQFTNQGRRNSQQRLKGLTDSIKEFGSQILKEHPVENSQLQNDRLFLYYLQNGRDMYTGEELDIDYLSQYDIDHIIPQAFIKDNSIDNRVLTSSKENRGKSDDVPSKDVVRKMKSYWSKLLSAKLITQRKFDNLTKAERGGLTDDDKAGFIKRQLVETRQITKHVARILDERFNTETDENNKKIRQVKIVTLKSNLVSNFRKEFELYKVREINDYHHAHDAYLNAVIGKALLGVYPQLEPEFVYGDYPHFHGHKENKATAKKFFYSNIMNFFKKDDVRTDKNGEIIWKKDEHISNIKKVLSYPQVNIVKKVEEQTGGFSKESILPKGNSDKLIPRKTKKFYWDTKKYGGFDSPIVAYSILVIADIEKGKSKKLKTVKALVGVTIMEKMTFERDPVAFLERKGYRNVQEENIIKLPKYSLFKLENGRKRLLASARELQKGNEIVLPNHLGTLLYHAKNIHKVDEPKHLDYVDKHKDEFKELLDVVSNFSKKYTLAEGNLEKIKELYAQNNGEDLKELASSFINLLTFTAIGAPATFKFFDKNIDRKRYTSTTEILNATLIHQSITGLYETRIDLNKLGGD

SEQ ID NO: 708 - protein, 1345 aa, Streptococcus mutans; identical to SEQ ID NO: 707

SEQ ID NO: 709 - protein, 1345 aa, Streptococcus mutans; identical to SEQ ID NO: 704

SEQ ID NO: 710 - protein, 1345 aa, Streptococcus mutans; identical to SEQ ID NO: 705

SEQ ID NO: 711 - protein, 1345 aa, Streptococcus mutans; identical to SEQ ID NO: 706

SEQ ID NO: 712 - protein, 1345 aa, Streptococcus mutans
MKKPYSIGLDIGTNSVGWAVVTDDYKVPAKKMKVLGNTDKSHIKKNLLGALLFDSGNTAEDRRLKRTARRRYTRRRNRILYLQEIFSEEMGKVDDSFFHRLEDSFLVTEDKRGERHPIFGNLEEEVKYHENFPTIYHLRQYLADNPEKVDLRLVYLALAHIIKFRGHFLIEGKFDTRNNDVQKLFQEFLAVYDNTFENSSLQEQNVQVEEILTDKISKSAKKDRVLKLFPNEKSNGRFAEFLKLIVGNQADFKKHFELEEKAPLQLSKDTYEEELEVLLAQIGDNYAELFLSAKKLYDSILLSGILTVTDVSTKAPLSASMIQRYNEHQMDLAQLKQFIRQKLSDKYNEVFSDVSKDGYAGYIDGKTNQEAFYKYLKGLLNKIEGSGYFLDKIEREDFLRKQRTFDNGSIPHQIHLQEMRAIIRRQAEFYPFLADNQDRIEKILTFRIPYYVGPLARGKSDFAWLSRKSADKITPWNFDEIVDKESSVEAFINRMTNYDLYLPNQKVLPKHSLLYEKFTVYNELTKVKYKTEQGKTAFFDANMKQEIFDGVFKVYRKVTKDKLMDFLEKEFDEFRIVDLTGLDKENKAFNASYGTYHDLRKILDKDFLDNSKNEKILEDIVLTLTLFEDREMIRKRLENYSDLLTKEQVKKLERRHYTGWGRLSAELIHGIRNKESRKTLLDYLIDDGNSNRNFMQLINDDALSFKEEIAKAQVIGETDNLNQVVSDIAGSPAIKKGILQSLKIVDELVKIMGHQPENIVVEMARENQFTNQGRRNSQQRLKGLTDSIKEFGSQILKEHPVENSQLQNDRLFLYYLQNGRDMYTGEELDIDYLSQYDIDHIIPQAFIKDNSIDNRVLTSSKENRGKSDDVPSKDVVRKMKSYWSKLLSAKLITQRKFDNLTKAERGGLTDDDKAGFIKRQLVETRQITKHVARILDERFNTETDENNKKIRQVKIVTLKSNLVSNFRKEFELYKVREINDYHHAHDAYLNAVIGKALLGVYPQLEPEFVYGDYPHFHGHKENKATAKKFFYSNIMNFFKKDDVRTDKNGEIIWKKDEYISNIKKVLSYPQVNIVKKVEEQTGGFSKESILPKGNSDKLIPRKTKKFYWDTKKYGGFDSPIVAYSILVIADIEKGKSKKLKTVKALVGVTIMEKMTFERDPIAFLERKGYRNVQEENIIKLPKYSLFKLENGRKRLLASARELQKGNEIVLPNHLGTLLYHAKNIHKVDEPKHLDYVDKHKDEFKELLDVVSNFSKKYTLAEGNLEKIKELYAQNNGEDLKELASSFINLLTFTAIGAPATFKFFDKNIDRKRYTSTTEILNATLIHQSITGLYETRIDLSKLGGD

SEQ ID NO: 713 - protein, 1345 aa, Streptococcus mutans; identical to SEQ ID NO: 712

SEQ ID NO: 714 - protein, 1345 aa, Streptococcus mutans
MKKPYSIGLDIGTNSVGWAVVTDDYKVPAKKMKVLGNTDKSHIKKNLLGALLFDSGNTAEDRRLKRTARRRYTRRRNRILYLQEIFSEEMGKVDDSFFHRLEDSFLVTEDKRGERHPIFGNLEEEVKYHENFPTIYHLRQYLADNPEKVDLRLVYLALAHIIKFRGHFLIEGKFDTRNNDVQRLFQEFLAVYDNTFENSSLQEQNVQVEEILTDKISKSAKKDRVLKLFPNEKSNGRFAEFLKLIVGNQADFKKHFELEEKAPLQFSKDTYEEDLEELLGKIGDDYADLFTLAKNLYDAILLSGILTADDSSTKAPLSASMIQRYNEHQMDLAQLKQFIRQKLSDKYNEVFSDVSKDGYAGYIDGKTNQEAFYKYLKGLLNKIEGSGYFLDKIEREDFLRKQRTFDNGSIPHQIHLQEMRAIIRRQAEFYPFLADNQDRIEKILTFRIPYYVGPLARGKSDFAWLSRKSADKITPWNFDEIVDKESSAEAFINRMTNYDLYLPNQKVLPKHSLLYEKFTVYNELTKVKYKTEQGKTAFFDANMKQEIFDGVFKVYRKVTKDKLMDFLEKEFDEFRIVDLTGLDKENKVFNASYGTYHDLCKILDKDFLDNSKNEKILEDIVLTLTLFEDREMIRKRLENYSDLLTKEQVKKLERRHYTGWGRLSAELIHGIRNKESRKTILDYLIDDGNSNRNFMQLINDDALSFKEEIAKAQVIGETDNLNQVVSDIAGSPAIKKGILQSLKIVDELVKIMGHQPENIVVEMARENQFTNQGRRNSQQRLKGLTDSIKEFGSQILKEHPVENSQLQNDRLFLYYLQNGRDMYTGEELDIDYLSQYDIDHIIPQAFIKDNSIDNRVLTSSKENRGKSDDVPSKDVVRKMKSYWSKLLSAKLITQRKFDNLTKAERGGLTDDDKAGFIKRQLVETRQITKHVARILDERFYTETDENNKKIRQVKIVTLKSNLVSNFRKEFELYKVREINDYHHAHDAYLNAVIGKALLGVYPQLEPEFVYGDYPHFHGHKENKATAKKFFYSNIMNFFKKDDVRTDKNGEIIWKKDEHISNIKKVLSYPQVNIVKKVEEQTGGFSKESILPKGNSDKLIPRKTKKFYWDTKKYGGFDSPIVAYSILVIADIEKGKSKKLKTVKALVGVTIMEKMTFERDPVAFLERKGYRNVQEENIIKLPKYSLFKLENGRKRLLASARELQKGNEIVLPNHLGTLLYHAKNIHKVDEPKHLDYVDKHKDEFKELLDVVSNFSKKYTLAEGNLEKIKELYAQNNGEDLKELASSFINLLTFTAIGAPATFKFFDKNIDRKRYTSTTEILNATLIHQSITGLYETRIDLSKLGGD

SEQ ID NO: 715 - protein, 1345 aa, Streptococcus mutans
MKKPYSIGLDIGTNSVGWAVVTDDYKVPAKKMKVLGNTDKSHIKKNLLGALLFDSGNTAEDRRLKRTARRRYTRRRNRILYLQEIFSEEMGKVDDSFFHRLEDSFLVTEDKRGERHPIFGNLEEEVKYHENFPTIYHLRQYLADNPEKVDLRLVYLALAHIIKFRGHFLIEGKFDTRNNDVQRLFQEFLAVYDNTFENSSLQEQNVQVEEILTDKISKSAKKDRVLKLFPNEKSNGRFAEFLKLIVGNQADFKKHFELEEKAPLQFSKDTYEEDLEELLGKIGDDYADLFTLAKNLYDAILLSGILTADDSSTKAPLSASMIQRYNEHQMDLAQLKQFIRQKLSDKYNEVFSDVSKDGYAGYIDGKTNQEAFYKYLKGLLNKIEGSGYFLDKIEREDFLRKQRTFDNGSIPHQIHLQEMRAIIRRQAEFYPFLADNQDRIEKILTFRIPYYVGPLARGKSDFAWLSRKSADKITPWNFDEIVDKESSAEAFINRMTNYDLYLPNQKVLPKHSLLYEKFTVYNELTKVKYKTEQGKTAFFDANMKQEIFDGVFKVYRKVTKDKLMDFLEKEFDEFRIVDLTGLDKENKVFNASYGTYHDLCKILDKDFLDNSKNEKILEDIVLTLTLFEDREMIRKRLENYSDLLTKEQVKKLERRHYTGWGRLSAELIHGIRNKESRKTILDYLIDDGNSNRNFMQLINDDALSFKEEIAKAQVIGETDNLNQVVSDIAGSPAIKKGILQSLKIVDELVKIMGHQPENIVVEMARENQFTNQGRRNSQQRLKGLTDSIKEFGSQILKEHPVENSQLQNDRLFLYYLQNGRDMYTGEELDIDYLSQYDIDHIIPQAFIKDNSIDNRVLTSSKENRGKSDDVPSKDVVRKMKPYWSKLLSAKLITQRKFDNLTKAERGGLTDDDKAGFIKRQLVETRQITKHVARILDERFNTETDENNKKIRQVKIVTLKSNLVSNFRKEFELYKVREINDYHHAHDAYLNAVIGKALLGVYPQLEPEFVYGDYPHFHGHEENKATAKKFFYSNIMNFFKKDDVRTDKNGEIIWKKDEHISNIKKVLSYPQVNIVKKVEEQTGGFSKESILPKGNSDKLIPRKTKKFYWDTKKYGGFDSPIVAYSILVIADIEKGKSKKLKTVKALVGVTIMEKMTFERDPVAFLERKGYRNVQEENIIKLPKYSLFKLENGRKRLLASARELQKGNEIVLPNHLGTLLYHAKNIHKVDEPKHLDYVDKHKDEFKELLDVVSNFSKKYTLAEGNLEKIKELYAQNNGEDLKELASSFINLLTFTAIGAPATFKFFDKNIDRKRYTSTTEILNATLIHQSITGLYETRIDLSKLGGD

SEQ ID NO: 716 - protein, 1345 aa, Streptococcus mutans
MKKPYSIGLDIGTNSVGWAVVTDDYKVPAKKMKVLGNTDKSHIKKNLLGALLFDSGNTAEDRRLKRTARRRYTRRRNRILYLQEIFSEEMGKVDDSFFHRLEDSFLVTEDKRGERHPIFGNLEEEVKYHENFPTIYHLRQYLADNPEKVDLRLVYLALAHIIKFRGHFLIEGKFDTRNNDVQRLFQEFLAVYDNTFENSSLQEQNVQVEEILTDKISKSAKKDRVLKLFPNEKSNGRFAEFLKLIVGNQADFKKHFELEEKAPLQFSKDTYEEELEVLLAQIGDNYAELFLSAKKLYDSILLSGILTVTDVSTKAPLSASMIQRYNEHQMDLAQLKQFIRQKLSDKYNEVFSDVSKDGYAGYIDGKTNQEAFYKYLKGLLNKIEGSGYFLDKIEREDFLRKQRTFDNGSIPHQIHLQEMRAIIRRQAEFYPFLADNQDRIEKILTFRIPYYVGPLARGKSDFAWLSRKSADKITPWNFDEIVDKESSAEAFINRMTNYDLYLPNQKVLPKHSLLYEKFTVYNELTKVKYKTEQGKTAFFDANMKQEIFDGVFKVYRKVTKDKLMDFLEKEFDEFRIVDLTGLDKENKVFNASYGTYHDLCKILDKDFLDNSKNEKILEDIVLTLTLFEDREMIRKRLENYSDLLTKEQVKKLERRHYTGWGRLSAELIHGIRNKESRKTILDYLIDDGNSNRNFMQLINDDALSFKEEIAKAQVIGETDNLNQVVSDIAGSPAIKKGILQSLKIVDELVKIMGHQPENIVVEMARENQFTKQGRRNSQQRLKGLTDSIKEFGSQILKEHPVENSQLQNDRLFLYYLQNGRDMYTGEELDIDYLSQYDIDHIIPQAFIKDNSIDNRVLTSSKENRGKSDDVPSKDVVRKMKSYWSKLLSAKLITQRKFDNLTKAERGGLTDDDKAGFIKRQLVETRQITKHVARILDERFYTETDENNKKIRQVKIVTLKSNLVSNFRKEFELYKVREINDYHHAHDAYLNAVIGKALLGVYPQLEPEFVYGDYPHFHGHKENKATAKKFFYSNIMNFFKKDDVRTDKNGEIIWKKDEHISNIKKVLSYPQVNIVKKVEEQTGGFSKESILPKGNSDKLIPRKTKKFYWDTKKYGGFDSPIVAYSILVIADIEKGKSKKLKTVKALVGVTIMEKMTFERDPVAFLERKGYRNVQEENIIKLPKYSLFKLENGRKRLLASARELQKGNEIVLPNHLGTLLYHAKNIHKVDEPKHLDYVDKHKDEFKELLDVVSNFSKKYTLAEGNLEKIKELYAQNNGEDLKELASSFINLLTFTAIGAPATFKFFDKNIDRKRYTSTTEILNATLIHQSITGLYETRIDLSKLGGD

SEQ ID NO: 717 - protein, 1345 aa, Streptococcus mutans
MKKPYSIGLDIGTNSVGWAVVTDDYKVPAKKMKVLGNTDKSHIKKNLLGALLFDSGNTAEDRRLKRTARRRYTRRRNRILYLQEIFSEEMGKVDDSFFHRLEDSFLVTEDKRGERHPIFGNLEEEVKYHENFPTIYHLRQYLADNPEKVDLRLVYLALAHIIKFRGHFLIEGKFDTRNNDVQRLFQEFLAVYDNTFENSSLQEQNVQVEEILTDKISKSAKKDRVLKLFPNEKSNGRFAEFLKLIVGNQADFKKHFELEEKAPLQFSKDTYEEELEVLLAQIGDNYAELFLSAKKLYDSILLSGILTVTDVSTKAPLSASMIQRYNEHQMDLAQLKQFIRQKLSDKYNEVFSDVSKDGYAGYIDGKTNQEAFYKYLKGLLNKIEGSGYFLDKIEREDFLRKQRTFDNGSIPHQIHLQEMRAIIRRQAEFYPFLADNQDRIEKILTFRIPYYVGPLARGKSDFAWLSRKSADKITPWNFDEIVDKESSAEAFINRMTNYDLYLPNQKVLPKHSLLYEKFTVYNELTKVKYKTEQGKTAFFDANMKQEIFDGVFKVYRKVTKDKLMDFLEKEFDEFRIVDLTGLDKENKVFNASYGTYHDLCKILDKDFLDNSKNEKILEDIVLTLTLFEDREMIRKRLENYSDLLTKEQVKKLERRHYTGWGRLSAELIHGIRNKESRKTILDYLIDDGNSNRNFMQLINDDALSFKEEIAKAQVIGETDNLNQVVSDIAGSPAIKKGILQSLKIVDELVKIMGHQPENIVVEMARENQFTKQGRRNSQQRLKGLTDSIKEFGSQILKEHPVENSQLQNDRLFLYYLQNGRDMYTGEELDIDYLSQYDIDHIIPQAFIKDNSIDNRVLTSSKENRGKSDDVPSKDVVRKMKSYWSKLLSAKLITQRKFDNLTKAERGGLTDDDKAGFIKRQLVETRQITKHVARILDERFYTETDENNKKIRQVKIVTLKSNLVSNFRKEFELYKVREINDYHHAHDAYLNAVIGKALLGVYPQLEPEFVYGDYPHFHGHKENKATAKKFFYSNIMNFFKKDDVRTDRNGEIIWKKDEHISNIKKVLSYPQVNIVKKVEEQTGGFSKESILPKGNSDKLIPRKTKKFYWDTKKYGGFDSPIVAYSILVIADIEKGKSKKLKTVKALVGVTIMEKMTFERDPVAFLERKGYRNVQEENIIKLPKYSLFKLENGRKRLLASARELQKGNEIVLPNHLGTLLYHAKNIHKVDEPKHLDYVDKHKDEFKELLDVVSNFSKKYTLAEGNLEKIKELYAQNNGEDLKELASSFINLLTFTAIGAPATFKFFDKNIDRKRYTSTTEILNATLIHQSITGLYETRIDLSKLGGD

SEQ ID NO: 718 - protein, 1345 aa, Streptococcus mutans
MKKPYSIGLDIGTNSVGWAVVTDDYKVPAKKMKVLGNTDKSHIKKNLLGALLFDSGNTAEDRRLKRTARRRYTRRRNRILYLQEIFSEEMGKVDDSFFHRLEDSFLVTEDKRGERHPIFGNLEEEVKYHENFPTIYHLRQYLADNPEKVDLRLVYLALAHIIKFRGHFLIEGKFDTRNNDVQRLFQEFLAVYDNTFENSSLQEQNVQVEEILTDKISKSAKKDRVLKLFPNEKSNGRFAEFLKLIVGNQADFKKHFELEEKAPLQFSKDTYEEELEVLLAQIGDNYAELFLSAKKLYDSILLSGILTVTDVSTKAPLSASMIQRYNEHQMDLAQLKQFIRQKLSDKYNEVFSDVSKDGYAGYIDGKTNQEAFYKYLKGLLNKIEGSGYFLDKIEREDFLRKQRTFDNGSIPHQIHLQEMRAIIRRQAEFYPFLADNQDRIEKILTFRIPYYVGPLARGKSDFAWLSRKSADKITPWNFDEIVDKESSAEAFINRMTNYDLYLPNQKVLPKHSLLYEKFTVYNELTKVKYKTEQGKTAFFDANMKQEIFDGVFKVYRKVTKDKLMDFLEKEFDEFRIVDLTGLDKENKVFNASYGTYHDLCKILDKDFLDNSKNEKILEDIVLTLTLFEDREMIRKRLENYSDLLTKEQVKKLERRHYTGWGRLSAELIHGIRNKESRKTILDYLIDDGNSNRNFMQLINDDALSFKEEIAKAQVIGETDNLNQVVSDIAGSPAIKKGILQSLKIVDELVKIMGHQPENIVVEMARENQFTNQGRQNSQQRLKGLTDSIKEFGSQILKEHPVENSQLQNDRLFLYYLQNGRDMYTGEELDIDYLSQYDIDHIIPQAFIKDNSIDNRVLTSSKENRGKSDDVPSEDVVRKMKSYWSKLLSAKLITQRKFDNLTKAERGGLTDDDKAGFIKRQLVETRQITKHVARILDERFYTETDENNKKIRQVKIVTLKSNLVSNFRKEFELYKVREINDYHHAHDAYLNAVIGKALLGVYPQLEPEFVYGDYPHFHGHKENKATAKKFFYSNIMNFFKKDDVRTDKNGEIIWKKDEHISNIKKVLSYPQVNIVKKVEEQTGGFSKESILPKGNSDKLIPRKTKKFYWDTKKYGGFDSPIVAYSILVIADIEKGKSKKLKTVKALVGVTIMEKMTFERDPVAFLERKGYRNVQEENIIKLPKYSLFKLENGRKRLLASARELQKGNEIVLPNHLGTLLYHAKNIHKVDEPKHLDYVDKHKDEFKELLDVVSNFSKKYTLAEGNLEKIKELYAQNNGEDLKELASSFINLLTFTAIGAPATFKFFDKNIDRKRYTSTTEILNATLIHQSITGLYETRIDLSKLGGD

SEQ ID NO: 719 - protein, 1345 aa, Streptococcus mutans; identical to SEQ ID NO: 718

SEQ ID NO: 720 - protein, 1345 aa, Streptococcus mutans; identical to SEQ ID NO: 714

SEQ ID NO: 721 - protein, 1345 aa, Streptococcus mutans; identical to SEQ ID NO: 715

SEQ ID NO: 722 - protein, 1345 aa, Streptococcus mutans; identical to SEQ ID NO: 716

SEQ ID NO: 723 - protein, 1345 aa, Streptococcus mutans; identical to SEQ ID NO: 717

SEQ ID NO: 724 - protein, 1345 aa, Streptococcus mutans; identical to SEQ ID NO: 716

SEQ ID NO: 725 - protein, 1345 aa, Streptococcus mutans; identical to SEQ ID NO: 716

SEQ ID NO: 726 - protein, 1345 aa, Streptococcus mutans; identical to SEQ ID NO: 716

SEQ ID NO: 727 - protein, 1345 aa, Streptococcus mutans; identical to SEQ ID NO: 717

SEQ ID NO: 728 - protein, 1345 aa, Streptococcus mutans
MKKPYSIGLDIGTNSVGWAVVTDDYKVPAKKMKVLGNTDKSHIKKNLLGALLFDSGNTAEDRRLKRTARRRYTRRRNRILYLQEIFSEEMGKVNDSFFHRLEDSFLVTEDKRGERHPIFGNLEEEVKYHENFPTIYHLRQYLADNPEKVDLRLVYLALAHIIKFRGHFLIEGKFDTRNNDVQRLFQEFLAVYDNTFENSSLQEQNVQVEEILTDKISKSAKKDRVLKLFPNEKSNGRFAEFLKLIVGNQADFKKHFELEEKAPLQFSKDTYEEELEVLLAQIGDNYAELFLSAKKLYDSILLSGILTVTDVSTKAPLSASMIQRYNEHQMDLAQLKQFIRQKLSDKYNEVFSDVSKDGYAGYIDGKTNQEAFYKYLKGLLNKIEGSGYFLDKIEREDFLRKQRTFDNGSIPHQIHLQEMRAIIRRQAEFYPFLADNQDRIEKILTFRIPYYVGPLARGKSDFAWLSRKSADKITPWNFDEIVDKESSAEAFINRMTNYDLYLPNQKVLPKHSLLYEKFTVYNELTKVKYKTEQGKTAFFDANMKQEIFDGVFKVYRKVTKDKLMDFLEKEFDEFRIVDLTGLDKENKVFNASYGTYHDLCKILDKDFLDNSKNEKILEDIVLTLTLFEDREMIRKRLENYSDLLTKEQVKKLERRHYTGWGRLSAELIHGIRNKESRKTILDYLIDDGNSNRNFMQLINDDALSFKEEIAKAQVIGETDNLNQVVSDIAGSPAIKKGILQSLKIVDELVKIMGHQPENIVVEMARENQFTKQGRRNSQQRLKGLTDSIKEFGSQILKEHPVENSQLQNDRLFLYYLQNGRDMYTGEELDIDYLSQYDIDHIIPQAFIKDNSIDNRVLTSSKENRGKSDDVPSKDVVRKMKSYWSKLLSAKLITQRKFDNLTKAERGGLTDDDKAGFIKRQLVETRQITKHVARILDERFYTETDENNKKIRQVKIVTLKSNLVSNFRKEFELYKVREINDYHHAHDAYLNAVIGKALLGVYPQLEPEFVYGDYPHFHGHKENKATAKKFFYSNIMNFFKKDDVRTDKNGEIIWKKDEYISNIKKVLSYPQVNIVKKVEEQTGGFSKESILPKGNSDKLIPRKTKKFYWDTKKYGGFDSPIVAYSILVIADIEKGKSKKLKTVKALVGVTIMEKMTFERDPIAFLERKGYRNVQEENIIKLPKYSLFKLENGRKRLLASARELQKGNEIVLPNHLGTLLYHAKNIHKVDEPKHLDYVDKHKDEFKELLDVVSNFSKKYTLAEGNLEKIKELYAQNNGEDLKELASSFINLLTFTAIGAPAAFKFFDKNIDRKRYTSTTEILNATLIHQSITGLYETRIDLSKLGGD

SEQ ID NO: 729 - protein, 1345 aa, Streptococcus mutans; identical to SEQ ID NO: 728

SEQ ID NO: 730 - protein, 1345 aa, Streptococcus mutans
MKKPYSIGLDIGTNSVGWAVVTDDYKVPAKKMKVLGNTDKSHIKKNLLGALLFDSGNTAEDRRLKRTTRRRYTRRRNRILYLQEIFSEEMGKVDDSFFHRLEDSFLVTEDKRGERHPIFGNLEEEVKYHENFPTIYHLRQYLADNPEKTDLRLVYLALAHIIKFRGHFLIEGKFDTRNNDVQRLFQEFLAVYDNTFENSSLQEQNVQVEEILTDKISKSAKKDRVLKLFPNEKSNGCFAEFLKLIVGNQADFKKHFELEEKAPLQFSKDTYEEELEVLLAQIGDNYAELFLSAKKLYDSILLSGILTVTDVSTKAPLSASMIQRYNEHQMDLTQLKQFIRQKLSDKYNEVFSDVSKDGYAGYIDGKTNQEAFYKYLKGLLNKIEGSGYFLDKIEREDFLRKQRTFDNGSIPHQIHLQEMRAIIRRQAEFYPFLADNQDRIEKLLTFRIPYYVGPLASGKSDFAWLSRKSADKITPWNFDEIVDKESSAEAFINRMTNYDLYLPNQKVLPKHSLLYEKFTVYNELTKVKYKTEQGKTAFFDANMKQEIFDGVFKVYRKVTKDKLMDFLEKEFDEFRIVDLTGLDKENKVFNASYGTYHDLCKILDKDFLDNSKNEKILEDIVLTLTLFEDREMIRKRLENYSDLLTKEQVKKLERRHYTGWGRLSAELIHGIRNKESRKTILDYLIDDGNSNRNFMQLINDDALSFKEEIAKAQVIGETDNLNQVVSDIAGSPAIKKGILQSLKIVDELVKIMGHQPENIVVEMARENQFTNQGRRNSQQRLKGLTDSIKEFGSQILKEHPVENSQLQNDRLFLYYLQNGRDMYTGEELDIDYLSQYDIDHIIPQAFIKDNSIDNRVLTSSKENRGKSDDVPSKDVVRKMKSYWSKLLSAKLITQRKFDNLTKAERGGLTDDDKAGFIKRQLVETRQITKHVARILDERFNTETDENNKKIRQVKIVTLKSNLVSNFRKEFELYKVREINDYHHAHDAYLNAVIGKALLGVYPQLEPEFVYGDYPHFHGHKENKATAKKFFYSNIMNFFKKDDVRTDKNGEIIWKKDEHISNIKKVLSYPQVNIVKKVEEQTGGFSKESILPKGNSDKLIPRKTKKFYWDTKKYGGFDSPIVAYSILVIADIEKGKSKKLKTVKALVGVTIMEKMTFERDPVAFLERKGYRNVQEENIIKLPKYSLFKLENGRKRLLASARELQKGNEIVLPNHLGTLLYHAKNIHKVDEPKHLDYVDKHKDEFKELLDVVSNFSKKYTLAEGNLEKIKELYAQNNGEDLKELASSFINLLTFTAIGAPATFKFFDKNIDRKRYTSTTEILNATLIHQSITGLYETRIDLSKLGGD

SEQ ID NO: 731 - protein, 1345 aa, Streptococcus mutans; identical to SEQ ID NO: 730

SEQ ID NO: 732 - protein, 1350 aa, Streptococcus mutans
MKKPYSIGLDIGTNSVGWAVVTDDYKVPAKKMTVLGNTDKSHIKKNLLGALLFDSGNTAADRRLKRTARRRYTRRRNRILYLQEIFAEEMSKVDDSFFHRLEDSFLVTEDKRGERHPIFGNLEEEVKYHENFPTIYHLRQYLADNPEKVDLRLVYLALAHIIKFRGHFLIEGKFDTRNNDVQRLFQEFLAVYDNTFENSSLQEQNVQVEEILTDKISKSAKKDRVLKLFPNEKSNGRFAEFLKLIVGNQADFKKHFELEEKTPLQFSKDTYEEELEVLLAQIGDNYAELFLSAKKLYDSILLSGILTVTDVSTKAPLSASMIQRYNEHQMDLAQLKQFIRQKLSDKYNEVFSDVSKDGYAGYIDGKTNQEAFYKYLKGLLNKIEGSGYFLDKIEREDFLRKQRTFDNGSIPHQIHLQEMRAIIRRQAEFYPFLADNQDRIEKILTFRIPYYVGPLARGKSDFAWLSRKSADKITPWNFDEIVDKESSAEAFINRMTNYDLYLPNQKVLPKHSLLYEKFTVYNELTKVKYKTEQGKTAFFDANMKQEIFDGVFKVYRKVTKDKLMDFLEKEFDEFRIVDLTGLDKENKAFNASYGTYHDLRKILDKDFLDNSKNEKILEDIVLTLTLFEDREMIRKRLENYSDLLTKEQVKKLERRHYTGWGRLSAELIHGIRNKESRKTILDYLIDDGNSNRNFMQLINDDALSFKEEIAKAQVIGETDNLNQVVSDIAGSPAIKKGILQSLKIVDELVKIMGHQPENIVVEMARENQFTNQGRRNSQQRLKGLTDSIKEFGSQILKEHPVENSQLQNDRLFLYYLQNGRDMYTGEELDIDYLSQYDIDHIIPQAFIKDNSIDNRVLTSSKENRGKSDDVPSEDVVNRMRPFWNKLLSSGLISQRKYNNLTKKELTPDDKAGFIKRQLVETRQITKHVARMLDERFNKEFDDNNKRIRRVKIVTLKSNLVSSFRKEFELYKVREINDYHHAHDAYLNAVVVKALLVKYPKLEPEFVYGEYPKYNSYRERKTATQKMFFYSNIMNMFKSKVKLADDQIVERPMIEVNDETGEIAWDKTKHITTVKKVLSYPQVNIVKKVEEQTIGQNGGLFDDNPKSPLEVIPSKLVPLKKALNPEKYGGYQKPTTAYPILLIVDTKQLIPISVMDKKRFEQNPVKFLKDKGYQQIEKNNFVKLPKYTLVDIGNGIKRLWASSKEVHKGNQLVVSKKSQDLLYHAHHLDNDYSNEYVKNHYQQFDILFNEITSFSKKCKLGKEHIQKIEEAYSKERDSASIEELADGFIKLLGFTQLGATSPFSFLGIKLNQKQYTGKKDYLLPCMEATLIHQSITGLYETRIDLSKLGGD

SEQ ID NO: 733 - protein, 1350 aa, Streptococcus mutans; identical to SEQ ID NO: 732

SEQ ID NO: 734 - protein, 1345 aa, Streptococcus mutans
MKKPYSIGLDIGTNSVGWAVVTDDYKVPDKKMKVLGNTDKSHIKKNLLGALLFDSGNTAEDRRLKRTARRRYTRRRNRILYLQEIFSEEMGKVDDSFFHRLEDSFLVTEDKRGERHPIFGNLEEEVKYHENFPTIYHLRQYLADNPEKTDLRLVYLALAHIIKFRGHFLIEGKFDTRNNDVQRLFQEFLAVYDNTFENSSLQEQNVQVEEILTDKISKSAKKDRVLKLFPNEKSNGRFAEFLKLIVGNQADFKKHFELEEKAPLQFSKDIYEEELEVLLAQIGDNYAELFLSAKKLYDSILLSGILTVTDVSTKAPLSASMIQRYNEHQMDLAQLKQFIRQKLSDKYNEVFSDVSKDGYAGYIDGKTNQEAFYKYLKGLLNKIEGSGYFLDKIEREDFLRKQRTFDNGSIPHQIHLQEMRAIIRRQAEFYPFLADNQDRIEKILTFRIPYYVGPLARGKSDFAWLSRKSADKITPWNFDEIVDKESSVEAFINRMTNYDLYLPNQKVLPKHSLLYEKFTVYNELTKVKYKTEQGKTAFFDANMKQEIFDGVFKVYRKVTKDKLMDFLEKEFDEFRIVDLTGLDKENKAFNASYGTYHDLRKILDKDFLDNSKNEKILEDIVLTLTLFEDREMIRKRLKNYSDLLTKEQLKKLERRHYTGWGRLSAELIHGIRNKESRKTILDYLIDDGNSNRNFMQLINDDALSFKEEIAKAQVIGETDNLNQVVSDIAGSPAIKKGILQSLKIVDELVKIMGHQPENIVVEMARENQFTNQGRRNSQQRLKGLTDSIKEFGSQILKEHPVENSQLQNDRLFLYYLQNGRDMYTGEELDIDYLSQYDIDHIIPQAFIKDNSIDNRVLTSSKENRGKSDDVPSKDVVRKMKSYWSKLLSAKLITQRKFDNLTKAERGGLTDDDKAGFIKRQLVETRQITKHVARILDERFYTETDENNKKIRQVKIVTLKSNLVSNFRKEFELYKVREINDYHHAHDAYLNAVIGKALLGVYPQLEPEFVYGDYPHFHGHKENKATAKKFFYSNIMNFFKKDDVRTDKNGEIIWKKDEHISNIKKVLSYPQVNIVKKVEEQTGGFSKESILPKGNSDKLIPRKTKKFYWDTKKYGGFDSPIVAYSILVIADIEKGKSKKLKTVKALVGVTIMEKMTFERDPVAFLERKGYRNVQEENIIKLPKYSLFKLENGRKRLLASARELQKGNEIVLPNHLGTLLYHAKNIHKVDEPKHLDYVDKHKDEFKELLDVVSNFSKKYTLAEGNLEKIKELYAQNNGEDLKELASSFINLLTFTAIGAPATFKFFDKNIDRKRYTSTTEILNATLIHQSITGLYETRIDLSKLGGD

SEQ ID NO: 735 - protein, 1345 aa, Streptococcus mutans
MKKPYSIGLDIGTNSVGWAVVTDDYKVSAKKMKVLGNTDKSHIKKNLLGALLFDSGNTAEDRRLKRTARRRYTRRRNRILYLQEIFAEEMSKVDDSFFHRLEDSFLVTEDKRGERHPIFGNLEEEVKYHENFPTIYHLRQYLADNPEKVDLRLVYLALAHIIKFRGHFLIEGKFDTRNNDVQRLFQEFLAVYDNTFENSSLQEQNVQVEEILTDKISKSAKKDRVLKLFPNEKSNGRFAEFLKLIVGNQADFKKHFELEEKAPLQFSKDTYEEELEVLLAQIGDNYAELFLSAKKLYDSILLSGILTVTDVSTKAPLSASMIQRYNEHQMDLAQLKQFIRQKLSDKYNEVFSDVSKDGYAGYIDGKTNQEAFYKYLKGLLNKIEGSGYFLDKIEREDFLRKQRTFDNGSIPHQIHLQEMRAIIRRQAEFYPFLADNQDRIEKILTFRIPYYVGPLARGKSDFAWLSRKSADKITPWNFDEIVDKESSAEAFINRMTNYDLYLPNQKVLPKHSLLYEKFTVYNELTKVKYKTEQGKTAFFDANMKQEIFDGVFKVYRKVTKDKLMDFLEKEFDEFRIVDLTGLDKENKAFNASYGTYHDLRKILDKDFLDNSKNEKILEDIVLTLTLFEDREMIRKRLENYSDLLTKEQVKKLERRHYTGWGRLSAELIHGIRNKESRKTILDYLIDDGNSNRNFMQLINDDALSFKEEIAKAQVIGETDNLNQVVSDIAGSPAIKKGILQSLKIVDELVKIMGHQPENIVVEMARENQFTNQGRRNSQQRLKGLTDSIKEFGSQILKEHPVEHSQLQNDRLFLYYLQNGRDMYTGEELDIDYLSQYDIDHIIPQAFIKDNSIDNRVLTSSKENRGKSDDVPSKNVVRKMKSYWSKLLSAKLITQRKFDNLTKAERGGLTDDDKAGFIKRQLVETRQITKHVARILDERFHTETDENNKKIRQVKIVTLKSNLVSNFRKEFELYKVREINDYHHTHDAYLNAVIGKALLGVYPQLEPEFVYGDYPHFHGHKENKATAKKFFYSNIMNFFKKDDVRTDKNGEIIWKKDEHISNIKKVLSYPQVNIVKKVEEQTGGFSKESILPKGNSDKLIPRKTKKFYWDTKKYGGFDSPIVAYSILVIADIEKGKSKKLKTVKALVGVTIMEKMTFERDPVAFLERKGYRNVQEENIIKLPKYSLFKLENGRKRLLASARELQKGNEIVLPNHLGTLLYHAKNIHKVDEPKHLDYVDKHKDEFKELLDVVSNFSKKYTLAEGNLEKIKELYAQNNGEDLKELASSFINLLTFTAIGAPATFKFFDKNIDRKRYTSTTEILNATLIHQSITGLYETRIDLSKLGGD

SEQ ID NO: 736 - protein, 1345 aa, Streptococcus mutans; identical to SEQ ID NO: 735

SEQ ID NO: 737 - protein, 1345 aa, Streptococcus mutans
MKKPYSIGLDIGTNSVGWSVVTDDYKVPAKKMKVLGNTDKSHIEKNLLGALLFDSGNTAEDRRLKRTARRRYTRRRNRILYLQEIFSEEMGKVDDSFFHRLEDSFLVTEDKRGERHPIFGNLEEEVKYHENFPTIYHLRQYLADNPEKVDLRLVYLALAHIIKFRGHFLIEGKFDTRNNDVQRLFQEFLAVYDNTFENSSLQEQNVQVEEILTDKISKSAKKDRVLKLFPNEKSNGRFAEFLKLIVGNQADFKKHFELEEKAPLQFSKDTYEEELEVLLAQIGDNYAELFLSAKKLYDSILLSGILTVTDVGTKAPLSASMIQRYNEHQMDLAQLKQFIRQKLSDKYNEVFSDVSKDGYAGYIDGKTNQEAFYKYLKGLLNKIEGSGYFLDKIEREDFLRKQRTFDNGSIPHQIHLQEMRAIIRRQAEFYPFLADNQDRIEKLLTFRIPYYVGPLARGKSDFAWLSRKSADKITPWNFDEIVDKESSAEAFINRMTNYDLYLPNQKVLPKHSLLYEKFTVYNELTKVKYKTEQGKTAFFDANMKQEIFDGVFKVYRKVTKDKLMDFLEKEFDEFRIVDLTGLDKENKVFNASYGTYHDLCKILDKDFLDNSKNEKILEDIVLTLTLFEDREMIRKRLENYSDLLTKEQVKKLERRHYTGWGRLSAELIHGIRNKESRKTILDYLIDDGNSNRNFMQLINDDALSFKEEIAKAQVIGETDNLNQVVSDIAGSPAIKKGILQSLKIVDELVKIMGHQPENIVVEMARENQFTNQGRRNSQQRLKGLTDSIKEFGSQILKEHPVENSQLQNDRLFLYYLQNGRDMYTGEELDIDYLSQYDIDHIIPQAFIKDNSIDNRVLTSSKENRGKSDDVPSKDVVRKMKSYWSKLLSAKLITQRKFDNLTKAERGGLTDDDKAGFIKRQLVETRQITKHVARILDERFNTETDENNKKIRQVKIVTLKSNLVSNFRKEFELYKVREINDYHHAHDAYLNAVIGKALLGVYPQLEPEFVYGDYPHFHGHKENKATAKKFFYSNIMNFFKKDDVRIDKNGEIIWKKDEHISNIKKVLSYPQVNIVKKVEEQTGGFSKESILPKGNSDKLIPRKTKKFYWDTKKYGGFDSPIVAYSILVIADIEKGKSKKLKTVKALVGVTIMEKMTFERDPVAFLERKGYRNVQEENIIKLPKYSLFKLENGRKRLLASARELQKGNEIVLPNHLGTLLYHAKNIHKVDEPKHLDYVDKHKDEFKELLDVVSNFSKKYTLAEGNLEKIKELYAQNNGEDLKELASSFINLLTFTAIGAPATFKFFDKNIDRKRYTSTTEILNATLIHQSITGLYETRIDLSKLGGD

SEQ ID NO: 738 - protein, 1345 aa, Streptococcus mutans; identical to SEQ ID NO: 737

SEQ ID NO: 739 - protein, 1355 aa, Streptococcus mutans
MKKSYSIGLDIGTNSVGWAVVTDDYKVPAKKMKVLGNTDKSHIKKNLLGALLFDSGNTAEDRRLKRTARRRYTRRRNRILYLQEIFSEEMGKVDDSFFHRLDESFLTDDDKNFDSHPIFGNKAEEDAYHQKFPTIYHLRKHLADSTEKADLRLVYLALAHMIKFRGHFLIEGELNAENTDVQKLFADFVGVYDRTFDDSHLSEITVDASSILTEKISKSRRLEKLINNYPKEKKNTLFGNLIALSLGLQPNFKTNFKLSEDAKLQFSKDTYEEDLEELLGKIGDDYADLFTLAKNLYDAILLSGILTADDSSTKAPLSASMIKRYAEHHEDLEKLKEFIKANKPELYHDIFKDETKNGYAGYIENGVKQDEFYKYLKNTLSKIAGSDYFLDKIEREDFLRKQRTFDNGSIPHQIHLQEMHAILRRQGDYYPFLKENQDRIEKILTFRIPYYVGPLARKNSRFAWAEYHSDEAVMPWNFDQVIDKESSAQAFIEHMTNNDLYLPNEKVLPKHSPLYEKYTVYNELTKIKYVTEIGEAKFFDANLKQEIFDGLFKHERKVTKKKLRTFLDKNFDEFRIVDIQGLDKETETFNASYATYQDLLKVIKDKVFMDNPENAEILENIVLTLTLFEDREMIKQRLAKYADVFDKKVIDQLARRHYTGWGRLSAKLLNGIRDKQSCKTIMDYLIDDAQSNRNLMQLITDDNLTFKDDIVKAQYVDNSDDLHQVVQSLAGSPAIKKGILQSLKIVDELVKVMGKEPEQIVVEMARENQTTAKGRRNSQQRYKRLKEAIKSLDRDLNHKILKEHPTDNQALQNNRLFLYYLQNGRDMYTGESLDINRLSDYDIDHVIPQAFIKDNSIDNRVLTSSKANRGKSDDVPSEDVVNRMRPFWNKLLSSGLISQRKYNNLTKKELTPDDKAGFIKRQLVETRQITKHVARMLDERFNKEFDDNNKRIRRVKIVTLKSNLVSSFRKEFELYKVREINDYHHAHDAYLNAVVVKALLVKYPKLEPEFVYGEYPKYNSYRERKTATQKMFFYSNIMNMFKSKVKLADDQIVERPMIEVNDETGEIAWDKTKHITTVKKVLSYPQVNIVKKVEEQTIGQNGGLFDDNPKSPLEVIPSKLVPLKKALNPEKYGGYQKPTTAYPILLIVDTKQLIPISVMDKKRFEQNPVKFLKDKGYQQIEKNNFVKLPKYTLVDIGNGIKRLWASSKEVHKGNQLVVSKKSQDLLYHAHHLDNDYSNEYVKNHYQQFDILFNEITSFSKKCKLGKEHIQKIEEAYSKERDSASIEELADGFIKLLGFTQLGATSPFSFLGIKLNQKQYTGKKDYLLPCMEATLIHQSITGLYETRIDLNKLGGD

SEQ ID NO: 740 - protein, 1355 aa, Streptococcus mutans; identical to SEQ ID NO: 739

SEQ ID NO: 741 - protein, 1125 aa, Streptococcus mutans
MTNGKILGLDIGIASVGVGIINAKTGNVEHASSRIFPAANADNNVERRSARGGRRLIRRKKHRLKRVEDLFEKYNIDTDFSNLNLNPYQLRVKGLNEQLSNEELFAILKNIAKRRGISYLDDAEDDSVGSSDYAKAIDENRKLLKKQTPGEIQLKRLEKYGQLRGNFTIQDENGEYHRLINVFSTSDYVKEARRILETQSYYNKFITESFVEDYIKILQGKRKYYVGPGNEKSRTDYGIYRTDGETLDNLFGILIGKCGFYPEEYRAAKASYTAQEYNFLNDLNNLTVPTETKKLSTEQKYQLVDFAKTASTLEAAKLLKEIAKLVGCQVEEIKGYRLDNKDKPDLHTFEPFRKLKSNLTTIAVENLSITTLDTLAHILTLNTEREGIEEAIQKELPNIFSDEQITGIIAVRKKNSQIFGKGWHSFSIKLMKELIPELYETSEEQMTILIRLKKVKTNSKITNRTKYINEQEVTDEIYNPVVSKSIRQTVKIINAAIKKYGAFDQIVIEMPRESNEEDERKFIADLQKSNAKEKDDAMKQAALLYNGKAELPHGVFHGHKELATKIRLWYQQGERCLYSGKHIDIHDLIHNQHMFEIDHVLPLSLSFDDSLANKVLVYSWANQEKGQRTPFQALPQMASAWSFRELRDYISKQKGISKKKRDYLLTEQDINKVEVKQKFIERNLVDTRYVSRVVLNTLQDALKVMNKETKISVIRGQFTSQLRRQWRIDKSRETYHHHAVDALIIAASSQLRLWKKQNNPMFAEDKHGQKINLDTGEVLSDDAYKELVYQAPYQGFVNTISSKSFEDEILFSYQVDSKVNRKISDATIYATRQAQLGKDKKEETYVLGKIKDIYSQAGYDAFRKKYDKDKAVFLMYQKDPETWEKVIEVILRDYKELDDKGKEIGNPFERYKVKHGFVRKYSRKNKGTEIKSLKYYDNKLGNHIDITPNNSKHSVVLQSINPWRADLYFNPETTKYELMGLKYADLSFEKGTGKYSISREKYDEIKEREGISSKSEFKFTLYKNDLILVKDIGNHKELIARFNSKNDTSKHYVELKPWNKAKFDSEEELIPAFGKVAKSGQFIKGLNKPDLSIYKVKTDILGHKYYIKKEGDKPKLNFENKIKNK

SEQ ID NO: 742 - protein, 1125 aa, Streptococcus mutans
MTNGKILGLDIGIASVGVGIINAKTGNVEHASSRIFPAANADNNVERRSARGGRRLIRRKKHRLKRVEDLFEKYNIDTDFSNLNLNPYQLRVKGLNEQLSNEELFAILKNIAKRRGISYLDDAEDDSVGSSDYAKAIDENRKLLKKQTPGEIQLKRLEKYGQLRGNFTIQDENGEYHRLINVFSTSDYVKEARRILETQSYYNKFITESFVEDYIKILQGKRKYYVGPGNEKSRTDYGIYRTDGETLDNLFGILIGKCGFYPEEYRAAKASYTAQEYNFLNDLNNLTVPTETKKLSTEQKYQLVDFAKTASTLGAAKLLKEIAKLVGCQVEEIKGYRLDNKDKPDLHTFEPFRKLKSNLTTIAVENLSITTLDTLAHILTLNTEREGIEEAIQKELPNIFSDEQITEIIAVRKKNSQIFGKGWHSFSIKLMKELIPELYETSEEQMTILTRLKKVKTNSKITNRTKYINEEEITDEIYNPVVSKSIRQTVKIINATIKKYGAFDQIIIEMPRESNEEDERKFIADLQKSNAKEKDDAMKQAALLYNGKDELPHDVFHGHKELATKIRLWYQQGERCLYSGKHIDIHDLIHNQHMFEIDHVLPLSLSFDDSLANKVLVYSWANQEKGQRTPFQALPQMASAWSFRELRDYISKQKGISKKKRDYLLTEQDINKVEVKQKFIERNLVDTRYVSRVVLNTLQDALKVMNKETKISVIRGQFTSQLRRQWRIDKSRETYHHHAVDALIIAASSQLRLWKKQNNPMFAEDKHGQKINLDTGEVLSDDAYKELVYQAPYQGFVNTISSKSFEDEILFSYQVDSKVNRKISDATIYATRQAQLGKDKKEETYVLGKIKDIYSQAGYDAFRKKYDKDKAVFLMYQKDPETWEKVIEVILRDYKELDDKGKEIGNPFERYKVKHGFVRKYSRKNKGTEIKSLKYYDNKLGNHIDITPNNSKHSVVLQSINPWRADLYFNPETTKYELMGLKYADLSFEKGTGKYSISREKYDEIKEREGISSKSEFKFTLYKNDLILVKDIGNHKELIARFNSKNDTSKHYVELKPWNKAKFDSEEELIPAFGKVAKSGQFIKGLNKPDLSIYKVKTDILGHKYYIKKEGDKPKLNFENKIKNK

SEQ ID NO: 743 - protein, 1125 aa, Streptococcus mutans; identical to SEQ ID NO: 742

SEQ ID NO: 744 - protein, 1125 aa, Streptococcus mutans; identical to SEQ ID NO: 741

SEQ ID NO: 745 - protein, 670 aa, Streptococcus oralis
MAKFNKNYSIGLDIGVSSVGYAVVTEDYRVPAFKFKVLGNTEKEKIKKNLIGSTTFVPAQSAQGTRVFRVNRRRIDRRNHRIAYLRDIFQKEIGKIDKNFYRRLDESFRVLGDKSEDIQIKQPFFGNKELETAYHKKYPTIYHLRKHLADADKNSPVADIREVYMALSHIFKYRGHFLTLGKIDPNNINMQNSWIDFIESCQDAFDLEISDESKTIAAIFKSSDNRQEKVKGILSYFQPELAKKDKSIFKQLLQLLFGLKTKFKECFELEEEPDLNFSKENYDENLENLLGTLEEDFPDVFAKLKILRDTILLSDMLTYTGATHARFSATMVERYEEHRKDLQRFKSFVKQNLSEQDYLDIFGRKTPNGFDVDKETKGYVGYISNKMVLTNKQKTIQQNFYDYISGKITGIEGAEYFLNKISDGTFLRKLRTTDNGTIPNQIHAYELEKIIERQGRDYPFLLENKDKLLSILTFKIPYYVGPLAKGNNSRFAWIKRTTSQDVLDNNDEDTKNGKIRPWNYHKLINMDETRDAFITNLIGNDIILLNEKVLPKRSLIYEEVMLQNELTRIKYKDKYGKIHFFDSELRQEIINNLFKTNSKRVSSAMLLAYLENFTNLQAVEIVSGIEKGKSLNSTLKTYNDLKTIFSEDLLDSEIYQKELEEIIKVITVFV

SEQ ID NO: 746 - protein, 1373 aa, Streptococcus oralis
MENKNYSIGLDIGTNSVGWAVITDDYKVPSKKMKVLGNTDKRFIKKNLIGALLFDEGTTAEARRLKRTARRRYTRRKNRLRYLQEIFAEEMSKVDSSFFHRLDDSFLIPEDKKGSKYPIFATLIEEKEYHKQFPTIYHLRKQLADSKEKTDLRLIYLALAHMIKYRGHFLYEDTFDIKNNDIQKIFNEFISIYNNTFEGNSLSGQNVQVEAIFTDKISKSAKRERVLKLFPDEKSTGLFSEFLKLIVGNQADFKKHFDLEEKAPLQFSRDTYDEDLENLLGQIGDDFADLFVAAKKLYDAILLSGILTVTDPSTKAPLSASMIERYENHQKDLATLKQFIKTNLPEKYDEVFSDQSKDGYAGYIDGKTTQESFYKYIKNLLSKFEGADYFLEKIEREDFLRKQRTFDNGSIPHQIHLQEMNAILRRQGEHYPFLKENKEKIEKILTFRIPYYVGPLARGNRDFAWLTRNSDQAIRPWNFEEIVDKASSAESFINKMTNYDLYLPEEKVLPKHSLLYETFAVYNELTKVKFIAEGLRDYQFLDSRQKKDIFYTLFKAEDKRKVTEKDIIQYLHTVDGYDGIELKGIEKQFNASLSTYHDLLKIIKDKEFMDDPNNEEILENIVHTLTIFEDREMIKQRLAQYDSLFDEKVIKALTRRHYTGWGKLSSKLINGIRDKQTGKTILDYLMDDGYNNRNFMQLINDDELSFKEIIKKAQVVGKTDDVKQVVQELPGSPAIKKGILQSIKLVDELVKVMGHEPESIVIEMARENQTTARGKKNSQQRYKRIEDSLKILASGLNAKILKEHPTDNIQLQNDRLFLYYLQNGRDMYTGKPLDINQLSSYDIDHIVPQAFIKDDSLDNRVLTSLKDNRGKSDNVPSLEVVEKMKTFWQQLLDSKLISYRKFNNLTKAERGGLDERDKVGFIKRQLVETRQITKHVAQILDARYNTEVNEKDKKNRTVKIITLKSNLVSNFRKEFRLYKIREINDYHHAHDAYLNAVVAKAILKKYPKLEPEFVYGDYQKYDLKRYISRSKDPKEIEKATEKYFFYSNLLNFFKEEVHYADGTIVKRENIEYSKDTGEIAWNKEKDFATIKKVLSLPQVNIVKKREVQTGGFSKESILPKGNSDKLIPRKTKDILWDTTKYGGFDSPVIAYSILLIADIEKGKAKRLKTVKTLVGITIMEKATFEKSPIAFLENKGYHNVRKENILCLPKYSLFELKNGRRRMLASAKELQKGNEIVLPVHLTTLLYHAKNIHRLDEPEHLEYIQKHRNEFKGLLNLVSEFSQKYVLADANLEKIKNLYADNEQADIEILANSFINLLTFTALGAPAAFKFFGKDVDRKRYTTVSEILNATLIHQSITGLYETRIDLSKLGED

SEQ ID NO: 747 - protein, 1371 aa, Streptococcus oralis
MENKNYSIGLDIGTNSVGWSVITDDYKVPSKKMKVLGNTDKRFIKKNLIGALLFDEGTTAEARRLKRTARRRYTRRKNRLRYLQEIFAEEMSKVDSSFFHRLDDSFLIPEDKRGSKYPIFATLAEEKEYHKQFPTIYHLRKQLADSKEKTDLRLIYLALAHMIKYRGHFLYEDTFDIKNNDIQKIFSEFISIYDNTFEGSSLSGQNAQVEAIFTDKISKSAKRERVLKLFPDEKSTGLFSEFLKLIVGNQADFKKHFDLGEKAPLQFSKDTYDEDLENLLGQIGDDFADLFLVAKKLYDAILLSGILTVTDPSTKAPLSASMIERYENHQKDLAVLKQFIKNNLPEKYDEVFSDQSKDGYAGYIDGKTTQEAFYKYIKNLLSKFEGTDYFLEKIEREDFLRKQRTFDNGSIPHQIHLQEMNAILRRQGEHYPFLKDNKEKIEKILTFRIPYYVGPLARGNRDFAWLTRNSDEAIRPWNFEEIVDKASSAEDFINKMTNYDLYLPEEKVLPKHSLLYETFAVYNELTKVKFIAEGLRDYQFLDSGQKKQIVTQLFKEKRKVTEKDIIQFLHNVDGYDGIELKGIEKQFNASLSTYHDLLKIIKDKEFMDDSKNEEILENIVHTLTIFEDREMIKQRLAQYDSLFDEKVIKALIRRHYTGWGKLSAKLIDGICDKQTGNTILDYLIDDGKNNRNFMQLINDDGLSFKEITQKAQVVGKTDDVKQVVQELPGSPAIKKGILQSIKIVDELVKVMGHTPESIVIEMARENQTTARGKKNSQQRYKRIEDALKNLASGLDSNILKEHPTNNIQLQNDRLFLYYLQNGRDMYTGKPLDINQLSSYDIDHIVPQAFIKDDSLDNRVLTSLKDNRGKSDNVPSIEVVQKRKAFWQQLLDSKLISERKFNNLTKAERGGLDERDKVGFIKRQLVETRQITKHVAQILDARFNKEVNEKDKKNRTVKIITLKSNLVSNFRKEFRLYKVREINDYHHAHDAYLNAVVAKAILKKYPKLEPEFVYGDYQKYDLKRYISRSRNPKEVEKATEKYFFYSNLLNFFKEEVHYADGTIVKRENIEYSKDTGEIAWNKEKDFATIKKVLSYPQVNIVKKREVQTGGFSKESILPKGNSDKLIPRKTKDILWETTKYGGFDSPVIAYSILLIADIEKGKAKKLKTVKTLVGITIMEKAAFEENPITFLENKGYHNVRKENILCLPKYSLFELENGRRRLLASAKELQKGNEIVLPVYLTTLLYHSKNVHKLDEPEHLEYIQKHRNEFKDLLNLVSEFSQKYVLADANLEKIQNLYADNEQADIEILANSFINLLTFTALGAPAAFKFFGKDIDRKRYTTVSEILNATLIHQSITGLYETRIDLSKLGED

SEQ ID NO: 748 - protein, 1121 aa, Streptococcus oralis
MNGLVLGLDIGIASVGVGILEKNSGKIIHANSRLFPAATADNNVERRKNRQARRLNRRKKHRGVRFQDLFEDYGLLTDFSKVSINLNPYRLRVDGLNQQLTNEELFIALKNIVKRRGISYLDDASEDGGAVSSDYGKAVEENRKLLAEQTPGQIQLERFEKYGQVRGDFTVVENGEKCRLINVFSTSAYRKEAEKILRKQQEFNNQITDEFIEDYLKILTGKRKYYHGPGNEKSRTDYGRFRTDGTTLDNIFGVLIGKCTFYPNEYRASKSSYTAQEFNLLNDLNNLTVPTETKKLSEEQKKVIVEYAKEAKTLGASTLLKYIVKMIDASVDQISGYRVDVNNKPEMHTFEVYRKMQSLETISVGELSRNVLDELAHILTLNTEREGIEEAINSKLMGVFSQDQVLELVQFRKNNSSLFSKGWHNFSLKLMMELIPELYETSEEQMTILTRLGKQKSKETSKRTKYIDEKELTEEIYNPVVAKSVRQAIKIINEATKKHGIFDNIVIEMARENNEEDAKKDYIKRQKANQDEKNAAMEKAAFQYNGKKELPGNIFNGHKELATKIRLWHQQGEKCLYTGKTIPISDLIHNQYKYEIDHILPLSLSFDDSLSNKVLVHATANQEKGQRTPFQALDSMDDAWSYREFKSYVKDLKSLSNKKKDYLLTEEDISKIEVKQKFIERNLVDTRYSSRVVLNALQDFYKSHQFDTTISVVRGQFTSQLRRKWGLEKSRETYHHHAVDALIIAASSQLRLWKKQNNPLITYKEGQFVDSQTGEIISLTDDEYKELVFKAPYDHFVDTLHSKTFEDGILFSYQVDSKYNRKISDATIYATRKAKLDKDKSEETYVLGKIKDIYSQAGYDAFIKIYNKDKRKFLMYHKDPQTFEKVIEEILRTYPSKERNDKNKEVPCNPFEKYRQENGPIRKYSKKGNGPEIKCLKYYDNKLGNYIDISPDGSDNQVVLQSLKPWRTDVYFNHQTKEYELMGLKYSDLSFEKGSGKYSISNEKYNSIKRIEGVNEQSEFKFTLYKNDLILIKDSENNEQKLFRFNSRNDTAKHYVELKPYDKARFDGQQELITILGNVAKGGQCLKGLNKSNISIFKVKTDVLGKKHIIKKEGDEPKLKF

SEQ ID NO: 749 - protein, 1134 aa, Streptococcus oralis
MNGLVLGLDIGIASVGVGILEKNSGKIVHASSRIFPAATADNNVERRKNRQARRLHRRKKHRGARLKDLFEYYGLLTDFSKVSINLNPYRLRVDGLDQQLTNEELFIALKNIVKRRGISYLDDASEDGGTVSSDYGKAVEENRKLLAEQTPGQIQLERFEKYGQLRGDFTVVENSEKCRLINVFSTSAYKKEAERILRKQQEFNNQITDEFIEDYLKILTGKRKYYHGPGNEKSRTDYGRFRTDGATLDNIFGILIGKCTFYPNEYRASKASYTAQEFNLLNDLNNLTVPTETKKLSEEQKKTIIEYAKSAKTLGASTLLKYIAKMIDASVDQIRGYRVDVNNKPEMHTFEVYRKMQSLETISVGELSRNILDELAHILTLNTEREGIEEAINTKLRDSFSQDQVLELVQFRKNNSSLFSKGWHNFSLKLMMELIPELYETSEEQMTILTRLGKQKSKETSKRTKYIDEKEVTEEIYNPVVAKSVRQAIKIINEATKKHGIFDNIVIEMARENNEEDAKKDYIKRQKANQDEKYAAMEKAAFQYNGKKELPDNIFHGHKELATKIRLWHQQGEKCLYTGKSIPISDLIHNQYKYEIDHILPLSLSFDDSLSNKVLVLATANQEKGQRTPFQALDSMDDAWSYREFKSYVKESKLLGNKKKEYLLTEEDISKIEVKQKFIERNLVDTRYSSRVVLNALQDFYKNHNFDTTISVVRGQFTSQLRRKWGLEKSRETYHHHAVDALIIAASSQLRLWKKQNNPLIAYKEGQFVDSQTGEIISLTDDEYKELVFKAPYDHFVDTLSSKTFEDSILFSYQVDSKFNRKISDATIYATRKAKLDKEKKEYTYTLGKIKDIYSLGTKTPSKTGFYKFLDLYNKDKSQFLMFQKDRKTWDEVIEKIMEQYRPFKEYDKAGKLVDFNPFEKYRQENGPIRKYSKKGNGPEIKSLKYYDILLGKHKNITPEGSRNTVALLSLNPWRTDVYYNMETKKYEFLGLKYADLPFEEGGAYGISTETYNELREKEGIGKNSEFKFTLYKNDLILIKDTETNCQQFFRFWSRTGKDNPKSFEKHKIELKPYEKAKFEKGEELEVLGKVPPSSNQFQKNMQIENLSIYKVKTDVLGNKHFIKKEGDKPKLKF

SEQ ID NO: 750 - protein, 550 aa, Streptococcus oralis
MYSLDKNGSPTPLYRDQLNQYEVDHIIPYSFLPIDSIDNKVLTHRENNQRKLDNIPDKETVANMKPFWEKLYNAKLISQTKYQRLTTSERTPDGVLTESMKAGFIERQLVETRQIIKHVARILDNRFSDTKIITLKSQLVTNFRNTFHIAKIRELNDYHHAHDAYLAVVVGQTLLKAYPKLAPELIYGHHAHFNRHEENKATIRKYLYSNIMRFFNNPDSKVSKDIWDCNRDLPIIKDIIYNSQVNFVKRTMIKKGAFYNQNPVGKFNKQIAANNRYPLKTKVSSLDTSIYGGYGPMNSALSIIIIAERFNEKKCKIETVKEFHDIFIIDYKKFNNDPFQFLNDTSENGFLKKNNINRVLAFYRVPKYSLMQKIDGTRMLFESKSNLHKATQFKLTKTQNELFFHMRRLLTKSNLMDLKSESAIKESQNFILKHKEEFDNISNQLSAFSQKMLGDTTSLKNLIKGYNERKIKEINSSEETIKYFYDNFIKMFSFVKSGAPKDINDFFNNKYTVARMRPKPDKKLLNATLIHQSITGLYETRIDLSKLGED

SEQ ID NO: 751 - protein, 1140 aa, Streptococcus parasanguinis
MNGLVLGLDIGIASVGVGILKKDIGEIIHTNSRLFSAATADSNIERRGHRGGKRLTRRKKHRSIRLHDLFEDFGLLTDFSKVSINLNPYQLRVQGLDNQLTNEELFIALKNIVKRRGISYLDDASEDGGTVSSDYGKAVEENRKLLAEQTPGQIQLDRFEKYGQVRGDFNVVENGEKRRLINVFTTSAYSKEAERILRKQQEFNKKITDEFIEDYLTILTGKRKYYHGPGNEKSRTDYGRYTTKKDPEGKYITLDNIFGILIGKCTFYPDEYRASKASYTAQEFNLLNDLNNLTVPTETKKLSEEQKKTIIKYAKTAKTLGASTLLKYIAKLIGASVDQIHGYRIDPNKKPEMHTFETYRKMQSLETISVEELPRKVLDELAHILTLNTEREGIEEAINATLKDTFSQDQVLELVQFRKNNSSLFSKGWHSFSLKLMMELIPELYETSEEQMTILTRLGKQKSKETSKRTKYIDEKELTEEIYNPVVAKSVRQAIKIINEATKKYGIFDNIVIEMARENNEEDAKKEYIKRQKANLDEKNAAMEKAAFQYNGKKELPDNVFHGHKELATKIRLWHQQGEKCLYTGKNIPISDLIQNQYKYEIDHILPLSLSFDDSLSNKVLVLATANQEKGQRTPFQALDSMDDAWSYREFKSYVKDSKLLGNKKKEYLLTEEDISKIEVKQKFIERNLVDTRYSSRVVLNALQDFYKEHQFDTTISVVRGQFTSQLRRKWGLEKSRETYHHHAVDALIIAASSQLRLWKKQNNPLISYTEGQFVDQVTGEIISLSDDEYKELVFKAPYDHFVDTLKSKKFEDSILFSYQVDSKYNRKISDATIYATRKAKLDKENKEYTYTLGKIKDIYALGTKSPSKTGFYKFLDLYNKDKSQFLMFQKDRKTWDEVIEKIIEQYRPFKEYDENGKEVDFNPFEKYRIENGPIRKYSKKGNGPEIKSLKYYDNLLGKFVDITPSESKNPVALLSLNPWRTDVYYNTETSKYEFLGLKYADLCFEKGGAYGISEVKYNKIREKEGIGKESEFKFTLYKNDLILIKDTETNCQQIFRFWSRTGKDNPKSFEKHKIELKPYEKARFEKGEELEVLGKVPPSSNQLQKNMQIENLSIYKVKTDVLGNKHFIKKEGEEPKLKF

SEQ ID NO: 752 - protein, 1374 aa, Streptococcus pseudoporcinus
MKKRYSYSIGLDIGTNSVGWAVINEDYKVPAKKMTVFGNTDRKTIKKNLLGTVLFDSGETAQARRLKRTNRRRYTRRRYRLCQLQNIFATEMVKVDDTFFQRLSESFFYYQDKAFDKHPIFGNSKEERAYHKTYPTIYHLRKDLADRDQKADLRLIYLALSHIIKFRGHFLIEGKLNSENTDVQKLFIALVTVYNLLFEEEPIAGETCDAKALLTAKTSKSKRLESLISEFPGQKKNGLFGNLLALALGLRPNFKSNFGLSEDAKLQITKDTYEEELDNLLAEIGDHYADLFLAAKNLSDAILLSDILTLSDENTRAPLSASMIKRYEEHQEDLALLKKLVKEQMPEKYWEIFSNAKKNGYAGYIEGKVSQEDFYRYIKPILSRLKGGDEFLAKIDRDDFLRKQRTFDNGSIPHQIHLKELHAILRRQEKYYPFLAEQKEKIEQLLCFRIPYYVGPLAKGGNSSFAWLKRRSDEPITPWNFKDVVDEEASAQAFIEGMTNYDTYLPEEKVLPKHSPLYEMFTVYNELTKVKYIAENMTKPLYLSAEQKEAIIDHLFKQTRKVTVKDLKEKYFSQIEGLENVDVTGVEGAFNASLGTYNDLLKIIKDKAFLDDEANAEILEEIVLILTLFQDEKLIEKRLAKYANLFEKSVLKKLRKRHYRGWGRLSRQLIDGMKDKASGKTILDFLKADDFANRNFIQLINDSSLDFEKLIDDAQKKAIKRESLTEAVANLAGSPAIKKGILQSLKVVDEIVKVMGHNPDNIVIEMSRENQTTAQGLKNARQRLKKIKEVHKKTGSRILEDNSERITNLTLQDNRLYLYLLQDGKDMYTGQDLDINNLSQYDIDHIIPQSFIKDNSIDNLVLTTQKANRGKSDNVPSIEVVRDMKDRVWRRQLANGAISRQKFDHLTKAERGGLADSDKARFLRRQLVETRQITKHVAQLLDSRFNSKSNQNKKLARNVKIITLKSKIVSDFRKDFGLYKLREVNNYHHAHDAYLNAVVGTALLKKYPKLEAEFVYGDYKHFDLVKLISKSDPSLGKATAKVFFYSNIMNFFKEELSLADGTLMKRPVIETNTETGEVVWDKVKDFKTIRKVLSYPQVNIVKKTEIQSGAFSKESVLSKGNSDKLIERKKGWDPKKYGGFDSPNTAYSIFVVAKVAKRKAQKLKTVKEIVGITIMEQAEYEKDNIAFLEKKGYQDIQEKLLIKLPKYSLFELENGRRRLLASANEFQKGNELALSGKYMKFLYLASRYDKLSSKIESEQQKKLFVEQHLHYFDEILDIVVKHATCYIKAENNLKKIISLYKKKEAYSINEQALNMLNLFIFTSLGAPSTFVFFDETIDRKRYTTSSDVLNGILIQQSITGLYETRIDLSRFGGD

SEQ ID NO: 753 - protein, 1052 aa, Streptococcus pyogenes
LSASMIKRYDEHHQDLTLLKALVRQQLPEKYKEIFFDQSKNGYAGYIDGGASQEEFYKFIKPILEKMDGTEELLAKLNREDLLRKQRTFDNGSIPHQIHLGELHAILRRQEDFYPFLKDNREKIEKILTFRIPYYVGPLARGNSRFAWMTRKSEETITPWNFEEVVDKGASAQSFIERMTNFDKNLPNEKVLPKHSLLYEYFTVYNELTKVKYVTEGMRKPAFLSGEQKKAIVDLLFKTNRKVTVKQLKEDYFKKIECFDSVEISGVEDRFNASLGTYHDLLKIIKDKDFLDNEENEDILEDIVLTLTLFEDREMIEERLKTYAHLFDDKVMKQLKRRRYTGWGRLSRKLINGIRDKQSGKTILDFLKSDGFANRNFMQLIHDDSLTFKEDLQKAQVSGQGDSLHEHIANLAGSPAIKKGILQTVKVVDELVKVMGRHKPENIVIEMARENQTTQKGQKNSRERMKRIEEGIKELGSDILKEYPVENTQLQNEKLYLYYLQNGRDMYVDQELDINRLSDYDVDHIVPQSFLKDDSIDNKVLTRSDKNRGKSDNVPSEEVVKKMKNYWKQLLNAKLITQRKFDNLTKAERGGLSELDKAGFIKRQLVETRQITKHVAQILDSRMNTKYDENDKLIREVRVITLKSKLVSDFRKDFQFYKVREINNYHHAHDAYLNAVVGTALIKKYPKLESEFVYGDYKVYDIRKMIAKSEQEIGKATAKYFFYSNIMNFFKTEITLANGEIRKRPLIETNGETGEIVWDKGRDFATVRKVLSMPQVNIVKKTEVQTGGFSKESILPKRNSDKLIARKKDWDPKKYGGFDSPTVAYSVLVVAKVEKGKSKKLKSVKELVGITIMERSSFEKDPVDFLEAKGYKEVRKDLIIKLPKYSLFELENGRKRMLASAGELQKGNELALPSKYVNFLYLASHYEKLKGSPEDNEQKQLFVEQHKHYLDEIIEQISEFSKRVILADANLDKVLSAYNKHRDKPIREQAENIIHLFTLTNLGAPAAFKCFDTTIGRNRYKSIKEVLDATLIHQSITGLYETRIDLSQLGGD

SEQ ID NO: 754 - protein, 1368 aa, Streptococcus pyogenes; identical to SEQ ID NO: 42

SEQ ID NO: 755 - protein, 1367 aa, Streptococcus pyogenes; identical to SEQ ID NO: 246

SEQ ID NO: 756 - protein, 1368 aa, Streptococcus pyogenes [sequence omitted]

SEQ ID NO: 757 - protein, 1370 aa, Streptococcus ratti
MKKPYSIGLDIGTNSVGWAVITDDYKVPAKKMKVLGNTDKNYIKKNLLGALLFDSGNTAEDRRLKRTARRRYTRRRNRLLYLQDIFSDEMNKVDESFFHRLEDSFLVSEDKRGDHHPIFGNVVDEVKYHEQFPTIYHLRKYLADTPEKADLRLVYLALAHMIKFRGHFLIDDPKLDVKNTDSQELFSQFLTAYDVTQEDSHLADVKINISDIITEKMNKSRKVEALLFHFPSQKKNSFFGNLVSLVFGLLPNFKTNFNLAEDAKLQLSKDSYDEDLENLLGQIGDEYTDVFVAARKLYDSILLSGILTVNDLSTKAILSASMVRRYEEHNKDLAKLKAFVKANFTHDVFKEVFSDASKNGYAGYIEGKTSQEDFYKYVKNLIGKVDGSADFIEKIDREDFLRKQRTFDNGSIPHQVHLAEMKAILRRQGEYYPFLKEHAEKIQQILTFRIPYYVGPLDRHGHSDFAWASFNSEEKVTPWNFEEIIDKNKSAQAFIERMTNQDLYLPNEKVLPKHSPLYEKYTVYNELTKIKYVTETGTAKFFDANLKQEIFDGLFKKERKVTKRKLLTFLEKNFDEFRIVDIQGLDKETETFNASYGIYQDLLKIIKDKAFMDDSENADILEDIVLTLTLFEDREMIKQRLAKYADLFDKKVIDNLARRRYTGWGRLSAKLLNGIRDKRSRKTIMDYLVDDGRSNRNLMQLITDDNLTFKDEIAKAQYSDNSDDLHQVVQDLAGSPAIKKGILQSVKIVDELVKVMGYEPEQIVVEMARENQTTAKGRRNSQQRYKRLEEAIKNLDRDLNYKILKEHPTDNQALQNDRLFLYYLQNGRDMYTGESLDINRLSDYDIDHIIPQAFIKDNSIDNRVLVSSAKNRGKSDDVPSEDVVNRMRPFWNKLLNCGLISQRKYSNLTKKELTPNDKAGFIKRQLVETRQITKHVARILDEHFNKEFDEDKKRIRKVKVVTLKSNLVSNFRKEFELYKVREINDYHHAHDAYLNAVVAKALLMKYPKLEPEFVYGEYPKYNSYRERKTATQRMFFYSNIMNMFKSKVKLADERIIERPMIEVNDETGEIAWDKTKHIATVKKVLSYPQINIVKKVEEQTGGLTNETIYPRGSFDKLLNRKNTLEASKYGGFGSPTVAYCVLVVADSKNENGKVKKLKLGSELLGITILEKNDFENNSLDFLSRKGYQGVQEKKIIKLPKYSLFEFQDGSRRMLSSVMANDNKRGDLQKANEMILPAYLVKLLYHAKHINSVGEPAHKNYINEHCSEFQDLLNYIRQFADKFVDVDKNLSKIRSLSKSMAEYSVSEICSSFVNLLTLTALGAPADFKFFGTTIPRKRYGSPQSILSATLIHQSITGLYETRIDLSKLGED

SEQ ID NO: 758 - protein, 1135 aa, Streptococcus salivarius
MSDLVLGLDIGIGSVGVGILNKVTGEIIHKNSRIFPAAQAENNLERRTNRQGRRLTRRKKHRRVRLNHLFEESGLITDFTKVSINLNPYQLRVKGLTAELSNEELFIALKNMVKHRGISYLDDASDDGNSSVGDYAQIVKENSKQLETKTPGQIQLERYQKYGQLRGDFTVEEDGRKHRLINVFPTSAYHAEALRILQTQQEFNPQITDEFINSYLEILTGKRKYYHGPGNEKSRTDYGKYTTKKDAQGQYITLNNIFGILIGKCTFYPEEYRAAKASYTAQEFNLLNDLNNLTVPTETKKLSEEQKYQIITYVKNEKAMGPAKLFKYIAKLLACDIADIKGYRIDKSDKAEIHTFEAYRKMKTLETIDIEQIEREKLDKLAYVLTLNTEREGIQEALDHEFADGTFSQEQVDELVQFRKANSSIFGKGWHSFSVKLMMELIPELYATSEEQMTILTRLGKQKTTSSSNKTKYIDEKQLTEEIYNPVVAKSVRQAIKIVNAAIKKYGDFDNIVIEMARETNEDDEKKAIQKIQKANKAEKDAAMRKAANQYNGKAELPHSVFHGHKQLATKIRLWHQQGERCLYTGKTISIHDLINNPNQFEIDHILPLSITFDDSLANKVLVYATANQEKGQRTPYQALDSMDDAWSFRELKAFVRESKALSNKKKEYLLTEEDISKFDVRKKFIERNLVDTRYASRVVLNALQEHFKAHKIDTKVSVVRGQFTSQLRRHWGIDKTRDTYHHHAVDALIIAASSQLNLWKKQKNTLVSYSEDQLLDIETGELISDDEYKESVFKAPYQHFVDTLKSKEFEDSILFSYQVDSKFNRKISDATIYATRQAKVGKDKKDETYVLGKIKDIYALGTKTPSKTGFYKFLDLYNKDKSQFLVYQKDRKTWDEVIEKIMEQYRPFKESDKNGKEVDFNPFEKYRIENGPIRKYSRKGNGPEIKSLKYYASKLGNHIDITPKDSNNKVVLQSVSPWRADVYFNKTTGSYEILGLKYADLQFEKGTGTYRISEEKYNDIKKKEGVDSDSEFKFTLYKNDLLLIKDTETKEQRLFRFLSRSMPNKKHYVELKPYSKDKFEKNESLIEILGSADKSGRCIKGLAKSNLSIFKVRTDVLGNQHIIKNEGDKPKLDF

SEQ ID NO: 759 - protein, 1127 aa, Streptococcus salivarius
MSDLVLGLDIGIGSVGVGILNKVTGEIIHKNSRIFPAAQAENNVERRINRQGRRLTRRKKHRRVRLNHLFEESGLITDFTNVSINLNPYQLRVKGLTDELSNEELFIALKNMVKHRGISYLDDASDDGNSSVGDYAQIVKENSKQLETKTPGQIQLERYQKYGQLRGDFTVEEDGKKHRLINVFPTSAYRAEALRILQTQQEFNPQITDEFINSYLQILTGKRKYYHGPGNEKSRTDYGRYTTKKDSEDEYITLDNIFGILIGKCTFYPEEYRAAKASYTAQEFNLLNDLNNLTVPTETKKLSEEQKNQIITNVKNEKAMGPAKLFKYIAKLLSCDVADIKGYRIDKSDKAEIHTFEAYRKMKTLATIDIEQMERENLDKLAYVLTLNTEKEGIQEALEHEFADGTFSQEQIDELVQFRKANSSIFGKGWHSFSVKLMMELIPELYATSEEQMTILTRLGKQKTTSSSNKTKYIDEKQLTEEIYNPVAAKSVRQAIKIVNAAIKEYGDFDNIVIEMARETNEDDEKKAIQKIQKANKDEKDAAMLKAANQYNGKAELPHSVFHGHKQLATKIRLWHQQGERCLYTGKTISIHDLINNSNQFEIDHILPLSITFDDSLANKVLVYATANQEKGQRTPYQALDSMDDAWSFRELKAFVRDSKALSNKKKEYLLTEEDISKFDVRKKFIERNLVDTRYASRVVLNALQEHFRVHKTDTKVSVVRGQFTSQLRRHWGIEKTRDTYHHHAVDALIIAASSQLNLWKKQKNTLVSYSEDQLLDIETGELISDDEYKESVFKAPYQHFVDTLKSKEFEDSILFSYQVDSKFNRKISDATIYATRQAKVGKDKKDETYVLGKIKDIYSQTGYDAFIKIYKKDKSKFLMYRHDPQTFEKVIEPILENYPNKELNEKGKEVPCNPFLKYKEDHGYIRKYSKKGNGPEIKSLKYYDSKLGNHIDITPKNSNNKVVLQSVSPWRADVYFNKTTGKYEILGLKYADLKFEKGTGTYKISEEKYNDIKIKEGVDSDSEFKFTLYKNDLLLIKDTETKEQQLFRFLSRTMPNVKHYVELKPYDKQKFDDNEELIKILGIVAKGGQCKKGVSKPNISIYKIRTDVLGNQHIIKNEGDKPKLDF

SEQ ID NO: 760 - protein, 1385 aa, Streptococcus salivarius
MTKPYSIGLDIGTNSVGWAVITDDYKVPSKKMKVLGNTSKKYIKKNLLGALLFDSGITAEGRRLKRTARRRYTRRRNRILYLQEIFSTEMATLDDAFFQRLDDSFLVPDDKRDSKYPIFGNLVEEKVYHDEFPTIYHLRKHLADSSKKADLRLVYLALAHMIKYRGHFLIEGDFNSKNNDLQKNFQDFLDTYNAIFESDLSLENSKQLEEIVKDKISKSAKKDRILKLFPGEKNSGIFSEFLKLIVGNQADFRKYFNLDEKTSLQFSKESYDEDLETLLGHIGDDYSDVFLKAKKLYDAILLSGILTVTDNGTEAPLSSAMIMRYKEHEEDLALLKAYIRNISLETYNEVFKDNTKNGYAGYIDGKTSQEDFYVYLKRLLAGLEGADYFLEKIDREDFLRKQRTFDNGSIPYQIYLQEMRAILDKQAKFYPFLAKNKERIEKILTFRIPYYVGPLARGNSDFAWSIRKRNEKITPWNFEDVIDKESSAEAFINRMTSFDLYLPEEKVLPKHSLLYENFTVYNELTKVRFIAEGMRDYQFLDSKQKKDIVRLYFKGKRKVTDKDIIEYLHAIDGYDGIELKGIEKQFNSSLSTYHDLLNIINDKEFLDDSSNETIIEEIIHTLTMFEDREMIKQRLSKFDNIFDKSVLKKLSRRHYTGWGKLSAKLINGIRDEKSGNTILDYLIDDGVSNRNFMQLIHDDALSFKKKIKKAQIIGDKDNIKQVVKSLPGSPAIKKGILQSIKIVDELVKVMGREPESIVVEMARENQYTNQGKSNSQQRLKRLEESLKGLGSKILKENVPTRLSKIDNNALQNDRLYLYYLQNGKDMYTGEELDIDRLSNYDIDHIIPQAFLKDDSIDNKVLVSSASNRGKSDDVPSLEVVKKRKTLWYQLLKSKLISQRKFDNLTKAERGGLSQEEKAGFIQRQLVETRQITKHVARLLDERFNNKKDENNRTLRTVKIITLKSSLVSQFRKDFELYKVREINDFHHAHDAYLNAVVASALLKKYPKLEPEFVYGDYPKYNSFRERKSATEKVYFYSNIMNIFKKSIPLADGTVIDRPLIEVNEETGESVWNKVADLNTVRKVLSYSQVNIVKKVEEQNHGLDRGKPKGLFNANLSSKPKPNSKENLVGAKEYLDPKKYGGYAGISNSFAILVKGTIEKGAKKKITNVLEFQGISILDRIYYRKDKLNFLLEKGYKDIELIIELPKYSLFELSDGSRRMLASILSTNNKRGEIHKGNQIFISQKFVKLLYHAKRISSTFNENHRKYVENHKKEFEELFYYILEFNENYVGAKKNGELLKSAFQSWQNHSIDELCSSFIGPTGSERKGLFELTSRGGAADFEFLGVKIPRYRDYTPSSLLKDATLIHQSVTGLYETRIDLGKLGED

SEQ ID NO: 761 - protein, 1392 aa, Streptococcus sanguinis
MENKNYSIGLDIGTNSVGWAVITDDYKVPSKKMKVFGNTDKHFIKKNLIGALLFDEGATAEDRRLKRTARRRYTRRKNRLRYLQEIFSEEISKLDSSFFHRLDDSFLVPKDKRGSKYPIFATLEEEKEYHKKFPTIYHLRKHLADSKEKTDLRLIYLALAHMIKYRGHFLYEESFDIKNNDIQKIFNEFISIYDNTFEGSSLSGQNAQVEAIFTDKISKSAKRERVLKLFSDEKSTSLFSEFLKLIVGNQADFKKHFDLEEKAPLQFSKDTYDEDLENLLGQIGDGFTDLFLVAKKLYDAILLSGILTVTDPSTKAPLSASMIERYESHQKDLAALKQFIKNNLPKRYNEVFSDQSKDGYAGYIDGKTTQEAFYKYIKNLLSKFEGADYFLDKIEREDFLRKQRTFDNGSIPHQIHLQEMNAILRRQGEHYPFLKENREKIEKILTFRIPYYVGPLARGNRDFAWLTRNSDQAIRPWNFEEIVDKASSAEEFINKMTNYDLYLPEEKVLPKHSLLYETFAVYNELTKVKFIAEGLRDYQFLDSGQKKQIVNQLFKEKRKVTEKDIIHYLHNVDGYDGIELKGIEKQFNASLSTYHDLLKIIKDKEFMDDPKNEEILENIVHTLTIFEDREMIKQRLAQYDSIFDEKVIKALTRRHYTGWGKLSAKLINGICDKQTGDTILDYLIDDGKINRNFMQLINDDGLSFKEIIQKAQVVGKTDDVKQVVQELPGSPAIKKGILQSIKIVDELVKVMGYAPESIVIEMARENQTTARGKKNSQQRYKRIEDSLKNLAPGLDSNILKENPTDNIQLQNDRLFLYYLQNGKDMYTGKPLDIDQLSSYDIDHIIPQAFIKDDSIDNRVLTSSKDNRGKSDNVPSLEVVQKRKAFWQQLLDSKLISERKFNNLTKAERGGLDERDKVGFIRRQLVETRQITKHVAQILDASFNTEVNEKNQKIRTVKIITLKSNLVSNFRKEFELYKVREINDYHHAHDAYLNAVVAKAILKKYPKLEPEFVYGDYQKYDLKRYISRFKPSKEIEKATEKYFFYSNLLNFFKEEVHYADGIIVKRENIEYSKDTGEIAWNKEKDFATIKKVLSYPQVNIVKKTEIQTHGLDRGKPKGLFNSNPSPKPSEDSKENLVPIKQGLDPRKYGGYAGISNSYAVLVKAIVEKGAKKQQKTILEFQGISILDKINFENNKENYLLKKRYIEILSTITLPKYSLFEFPDGTRRRLASILSTNNKRGEIHKGNELVLPGKYTTLLYHAKNINKKLEPEHLEYVEKHRNDFAKLLECVLNFNDKYVGALKNGERIRQAFTDWETVDIEKLCFSFIGPENSKNAGLFELTSQGSASDFEFLGVKIPRYRDYAPSSLLKATLIHQSITGLYETRIDLSKLGED

SEQ ID NO: 762 - protein, 1377 aa, Streptococcus sanguinis
MKKPYSIGLDIGTNSVGWAVITDDYKVPSKKMKVLGNTDKHFIKKNLIGALLFDEGTTAEDRRLKRTSRRRYTRRKNRLRYLQEIFSEEISKLDSSFFHRLDDSFLVPEDKRGSKYPIFATLEEEKEYHKKFPTIYHLRKHLADSKEKTDLRLIYLALAHMIKYRGHFLYEESFDIKNNDIQKIFNEFISIYDNTFEGSSLSGQNAQVEAIFTDKISKSTKRERVLKLFSDEKSTGLFSEFLKLIVGNQADFKKHFDLEEKAPLQFSKDTYDEDLENLLGQIGDGFADLFLVAKKLYDAILLSGILTVTDPSTKAPLSASMIERYENHQEDLAALKQFIKNNLSEKYAEVFSDQSKDGYAGFIDGKTTQEAFYKYIKNLLSKLEGADYFLNKIEREDFLRKQRTFDNGSIPHQIHLQEMNAILRRQGEHYLFLKENREKIEKILAFRIPYYVGPLARGNRDFAWLTRNSDQAIRPWNFEEVVDKASSAEDFINKMTNYDLYLPEEKVLPKHSLLYETFAVYNELTKVKFIAEGLRDYQFLDSGQKKQIVNQLFKDKRKVTEKDIIHYLHNVDGYDGIELKGIEKQFNASLSTYHDLLKIIKDKEFMDNPKNGEILENIIHTLTIFEDREMIKQRLAQYDTLFDEKVIKALTRRHYTGWGKLSAKLINGIRDKQTGKTILEYLIDDGDCNRNFMQLINDDGLSFKEIIQKAQVVGKTDDVKQVVQEIPGSPAIKKGILQSIKIVDELVKVMGHNPESIVIEMARENQTTAKGKKNSQQRYKRIEDALKNLAPGLDSNILKENPTDNIQLQNDRLFLYYLQNGKDMYTGKAIDINQLSNYDIDHIIPQAFIKDDSLDNRVLTSSKDNRGKSDNVPSIEVVQKRKAFWQQLLDSKLISERKFNNLTKAKRGGLDERDKVGFIKRQLVETRQITKHVAQLLDTRFNTEVNEENQKIRTVKIITLKSNLVSNFRKEFGLYKVREINDYHHAHDAYLNAVVAKAILKKYPKLEPEFVYGDYQKYDLKRYILKSKASNTIDKATEKYFFYSNLLNFFKEKVRYADGTIKKRENIEYSNDTGEIAWNKEKDFATIKKVLSLPQVNIVKKTEEQTVGQNGGLFDNNIVSKKKVVDASKLIPIKSSLSPEKYGGYARPTIAYSVLVIADIEKGKGKAKKLKRIKEIVGITIQDKKKFESNPVTYLEECGYKNINSNLIIKLPKYSLFEFNDGQRRLLASSIELQKGNELILPYHLTALLYHAQRINKISEPIHKQYVEAHQNEFKELLTTIISLSKKYIQKPNVELLLQQAFDQADKDIYQLSESFISLLKLTSFGAPGAFKFLGVEISQSSVRYKPNSQFLDTTLIHQSITGLYETRIDLSKLGED

SEQ ID NO: 763 - protein, 1370 aa, Streptococcus sanguinis
MKKPYSIGLDIGTNSVGWAVVTDDYKVPAKKMRVFGDTDRSHIKKNLLGTLLFDDGNTAESRRLKRTARRRYTRRRNRILYLQEIFTESMNEIDESFFHRLDDSFLVPEDKRGSKYPIFATLQEEKEYHKQFPTIYHLRKQLADSKEKSDVRLIYLALAHMIKYRGHFLYEETFDIKNNDIQKIFNEFINIYDNTFEGSSLSGQNAQVEAIFTDKISKSAKRERVLKLFPDEKSTGLFSEFLKLIVGNQADFKKHFDLEEKAPLQFSKDTYDEELENLLGQIGDDFADLFLIAKKLYDAILLSGILTVTDPSTKAPLSASMIERYENHQKDLAALKQFIKNNLPEKYVEVFSDQSKDGYAGYIDGKTTQEAFYKYIKNLLSKFEGADYFLDKIEREDFLRKQRTFDNGSIPHQIHLQEMNAILRRQGEHYPFLKENREKIEKILTFRIPYYVGPLARDNRDFSWLTRNSDEPIRPWNFEEVVDKARSAEDFIHRMTNYDLYLPEEKVLPKHSLLYETFAVYNELTKVKFIAEGLRDYQFLDSGQKKQIVNQLFKEKRKVTEKDIIHYLHNVDGYDGIELKGIEKQFNANLSTYHDLLKITKDKEFMDDPKNEEILENIVHTLTIFEDREMIKQRLAQYDTLFDEKVIKALTRRHYTGWGKLSAKLINGIRDKQSGKTILDYLIDDDKINRNFMQLINDDGLSFKEIIQKAQVVGKTDDVKQVVQELPGSPAIKKGILQSIKIVDELVKVMGYALESIVIEMARENQTTARGKKNSQQRYKRIEDALKNLAPGLDSNILKENPTDNIQLKNDRLFLYYLQNGKDMYTGKPLDINQLSSYDIDHIIPQAFIKDDSIDNRVLTSSKDNRGKSDNVPSLEVVQKRKAFWQQLLDSKLISERKFNNLTKAERGGLDERDKVGFIRRQLVETQQITKNVAQILDARFNTEVKEKNQKIRTVKIITLKSNLVSNFRKEFGLYKVREINNYHHAHDAYLNAVVAKAILKKYPKLEPEFVYGDYQKYDLKKYISRFKPSKEIEKATEKYFFYSNLLNFFKEEVLYADGTIRKRENIEYSKDTGEIAWDKEKDFATIKKVLSYPQVNIVKKREVQTGGFSKESILPKGNSDKLIPRKTKDILWDTTKYGGFDSPVIAYSILLIADIEKGKAKKLKTVKTLVGITIMEKAAFEENPITFLENKGYHNVRKENILCLPKYSLFELENGRRRLLASAKELQKGNEIVLPVCLTTLLYHSKNLHKLDEPEHLEYIQKHRNEFKDLLNLVSEFSQKYILAEANLEKIKDLYADNEQADIEILANSFINLLTFTALGAPAAFKFFGKDVDRKRYTTVSEILNATLIHQSITGLYETRIDLSKLGEE

SEQ ID NO: 764 - protein, 1421 aa, Streptococcus sanguinis
MTKFNKNYSIGLDIGVSSVGYAVVTEDYRVPAFKFKVLGNTEKEKIKKNLIGSTTFVSAQPAKGTRVFRVNRRRIDRRNHRITYLRDIFQKEIEKVDKNFYRRLDESFRVLGDKSEDLQIKQPFFGDKELETAYHKKYPTIYHLRKHLADADKNSPVADIREVYMAISHILKYRGHFLTLDKINPNNINMQNSWIDFIESCQEVFDLEISDESKNIADIFKSSENRQEKVKKILPYFQQELLKKDKSIFKQLLQLLFGLKTKFKDCFELEEEPDLNFSKENYDENLENFLGSLEEDFSDVFAKLKVLRDTILLSGMLTYTGATHARFSATMVERYEEHRKDLQRFKFFIKQNLSEQDYLDIFGRKTQNGFDVDKETKGYVGYITNKMVLTNPQKQKTIQQNFYDYISGKITGIEGAEYFLNKISDGTFLRKLRTSDNGAIPNQIHAYELEKIIERQGKDYPFLLENKDKLLSILTFKIPYYVGPLAKGSNSRFAWIKRATSSDILDDNDEDTRNGKIRPWNYQKLINMDETRDAFITNLIGNDIILLNEKVLPKRSLIYEEVMLQNELTRVKYKDKYGKAHFFDSELRQNIINGLFKNNSKRVNAKSLIKYLSDNHKDLNAIEIVSGVEKGKSFNSTLKTYNDLKTIFSEELLDSEIYQKELEEIIKVITVFDDKKSIKNYLTKFFGHLEILDEEKINQLSKLRYSGWGRYSAKLLLDIRDEDTGFNLLQFLRNDEENRNLTKLISDNTLSFEPKIKDIQSKSTIEDDIFDEIKKLAGSPAIKRGILNSIKIVDELVQIIGYPPHNIVIEMARENMTTEEGQKKAKTRKTKLESALKNIENSLLENGKVPHSDEQLQSEKLYLYYLQNGKDMYTLDKTGSPAPLYLDQLDQYEVDHIIPYSFLPIDSIDNKVLTHRENNQQKLNNIPDKETVANMKPFWEKLYNAKLISQTKYQRLTTSERTPDGVLTESMKAGFIERQLVETRQIIKHVARILDNRFSDTKIITLKSQLITNFRNTFHIAKIRELNDYHHAHDAYLAVVVGQTLLKVYPKLAPELIYGHHAHFNRHEENKATLRKHLYSNIMRFFNNPDSKVSKDIWDCNRDLPIIKDVIYNSQINFVKRTMIKKGAFYNQNPVGKFNKQLAANNRYPLKTKALCLDTSIYGGYGPMNSALSIIIIAERFNEKKGKIETVKEFHDIFIIDYEKFNNNPFQFLNDTSENGFLKKNNINRVLGFYRIPKYSLMQKIDGTRMLFESKSNLHKATQFKLTKTQNELFFHMKRLLTKSNLMDLKSKSAIKESQNFILKHKEEFDNISNQLSAFSQKMLGNTTSLKNLIKGYNERKIKEIDIRDETIKYFYDNFIKMFSFVKSGAPKDINDFFDNKCTVARMRPKPDKKLLNATLIHQSITGLYETRIDLSKLGED

SEQ ID NO: 765 - protein, 317 aa, Streptococcus sp.
FEDSILFSYQVDSKFNRKISDATIYATRKAKLDKEKSEETYVLGKIKDIYSQAGYDAFIKIYNKDKSKFLMYHKDPQTFEKVIEEILRTYPSKELNDKNKEIPCNPFEKYRQENGPIRKYSKKSNGPEIKSLKYYDNKLGNHIDITPESSDNQVVLQSLKPWRTDVYFNHQTKKYELMGLKYSDLSFEKGSGKYSISNQKYNSIKRIEGIDEQSEFKFTLYKNDLILIKDSENNEQKLFRFNSRNDTAKHYIELKPYDKAKFDGEQELITILGNVAKGGRCLKGLNKSNISIFKVKTDVLGKKHIIKKEGDEPKLKF

SEQ ID NO: 766 - protein, 1420 aa, Streptococcus sp.
MAKFNKNYSIGLDIGVSSVGYAVVTEDYRVPAFKFKVLGNTEKEKIKKNLIGSTTFVPAQSAQGTRVFRVNRRRIDRRNHRIAYLRDIFQKEIEKIDKNFYRRLDESFRVLGDKSEDIQIKQPFFGNKELETAYHKKYPTIYHLRKHLADADKNSPVADIREVYMVLSHILKYRGHFLTLGKIDPNNINMQNSWIDFIESCQDAFDLEISDESKTIAAIFKSSENRQEKVKQILSYFQQELLKKDKSIFKQLLQLLFGLKTKFKDCFELEEEPDLNFSKENYDENLENLLGALEEDFSDVFAKLKILRDTILLSSMLTYTGATHARFSATMVERYEEHRKDLQRFKSFVKQNLSEQDYLDIFGRKTPTGFDVDKETKGYVGYISNKMVLTNPQKQKTIQQNFYDYISGKITGIEGAECFLNKISDGTFLRKLRTTDNGAIPNQIHAYELEKIIERQGRDYPFLLENKDKLLSILTFKIPYYVGPLAKGNNSRFAWIKRTTSQDVLDDNDEDTRNGKIRPWNYHKLINMDETRDAFIINLIGNDIILLNEKVLPKRSLIYEEVMLQNELTRVKYKDKYGKIHFFNSELRQEIINNLFKTNSKRVSSAMLLSYLENFTNLQAVEIVSGIEKGKSLNSTLKTYNDLKTIFSEELLDSEIYQKELEEIIKVITVFDDKKSIKNYLTKYFGHLEFLNEEKINQLSKLRYTGWGRYSGKLLLGIRDEDTGFNLMQFLRNDDENRNLTQLISDTTLSFDSAIKAIQSKSTVEDDVFEEIKNLAGSPAIKRGILNSIKIVDELVQIIGYPPQNIIIEMARENMTTEEGQKKAKTRKSKLESALKNIEDSVLESGKVPHSDEQLQSEKLYLYYLQNGKDMYSLDKTGSPTPLYRDQLDQYEVDHIIPYSFLPIDSIDNKVLTHRENNQRKLNNIPDKETVANMKPFWEKLYNAKLISQTKYQRLTTSERTPDGVLTESMKAGFIERQLVETRQIIKHVARILDNRFSDTKIITLKSQLVTNFRNTFHIAKIRELNDYHHAHDAYLAVVVGQTLLKAYPKLAPELIYGHHAHFNRHEENKATLRKHLYSNIMRFFNNPDSKVSKDIWDCNRDLPIVKDVIYNSQINFVKRTMIKKGAFYNQNPVGKLNKQIAANNRYPLKTKVSSLDTSIYGGYGPMNSALSIIIIAERFNEKKGKIETVKEFHDIFIIDYEKFNNNPFQFLNNVSEEGFLKKNDLNRVLAFYRISKYSLMQKIDGTRMLFESKSNLHKVTQFKLTKTQNELFFHMKRLLTKSNLMDLKSESAIKESQNFIQTHQNEFDNIADRLSNYSQKMLGETKSLQTLINGYNERPIKQIDNNEETIRYYYDNFIKMFSFVKSGAPKDIINFFNDKYTVPRMRPKPDRKMLDATLIHQSITGLYETRIDLSKLGED

SEQ ID NO: 767 - protein, 1371 aa, Streptococcus sp.
MENKNYSIGLDIGTNSVGWSVITDDYKVPSKKMKVLGNTDKHFIKKNLIGALLFDEGTTAEARRLKRTARRRYTRRKNRLRYLQEIFSEEIGKVDSSFFHRLDDSFLIPEDKRGSKYPIFATLAEEKKYHKQFPTIYHLRKQLADSKEKTDLRLIYLALAHMIKYRGHFLYEEAFDIKNNDIQKIFNEFISIYNNTFEGNSLSGQNVQVEAIFTDKISKSAKRERVLKLFPDEKSTGLFSEFLKLIVGNQADFKKHFDLEEKAPLQFSRDTYDEDLENLLGQIGDDFADLFLVAKKLYDAILLSGILTVTNPSTKAPLSASMIERYENHQKDLASLKQFIKNNLPEKYDEVFSDQSEDGYAGYIDGKTTQETFYKYIKNLLSKFEGADYFLDKIEREDFLRKQRTFDNGSIPHQIHLQEMNAILRRQGEHYPFLKENKEKIEKILTFRIPYYVGPLARGNRDFAWLTRNSDQAIRPWNFEEIVDKASSAEDFINKMTNYDLYLPEEKVLPKHSLLYETFAVYNELTKVKFIAEGLRDYQFLDSGQKKQIVTQLFKEKRKVTEKDIIQFLHNVDGYDGIELKGIEKQFNASLSTYHDLLKIIKDKAFMDDAKNEAILENIVHTLTIFEDREMIKQRLAQYDSLFDEKVIKALTRRHYTGWGKLSAKLINGISDKQTGNTILDYLIDDGEINRNFMQLINDDGLSFKEIIQKAQVVGKTNDVKQVVQELPGSPAIKKGILQSIKIVDELVKVMGHAPESIVIEMARENQTTARGKKNSQQRYKRIEDSLKILASGLNSKILKEHPTDNIQLQNDRLFLYYLQNGKDMYTGEALDINQLSSCDIDHIIPQAFIKDDSLDNRVLTSSKDNRGKSDNVPSLEVVDKMKVFWQQLLDSKLISYRKFNNLTKAERGGLNELDKVGFIKRQLVETRQITKHVAQILDARFNKEVTEKDKKNRTVKIITLKSNLVSNFRKEFELYKVREINDYHHAHDAYLNAVVAKAILKKYPKLEPEFVYGDYQKYDLKRYISRSKDPKEIEKATEKYFFYSNLLNFFKEEVHYADGTIVKRENIEYSKDTGEIAWNKEKDFATIKKVLSLPQVNIVKKREVQTGGFSKESILPKGNSDKLIPRKTKDILWDTTKYGGFDSPVIAYSILLIADIEKGKAKKLKTVKTLVGITIMEKDAFEKNPIAFLENKGYHNVCKENILCLPKYSLFELENGRRRLLASAKELQKCNEIVLPVYLTTLLYHSKNVHKLDEPGHLEYIQKHRNEFKDLLNLVSEFSQKYVLADANLEKIKNLYADNEQADIEILANSFINLLTFTALGAPAAFKFFGKDVDRKRYTTVSEILNATLIHQSITGLYETRIDLSKLGED

SEQ ID NO: 768 - protein, 93 aa, Streptococcus sp.
MILIKDSENNEQKLFRFNSRNDTAKHYVELKPYDKARFDGQQELITILGNVAKGGQCLKGLNKSNISIFKVKTDVLGKKHIIKKEGDEPKLKF

SEQ ID NO: 769 - protein, 1121 aa, Streptococcus sp.
MNGLVLGLDIGIASVGVGILEKNSGKIIHANSRLFPAATADNNVERRKNRQARRLHRRKKHRGVRFQDLFEDYGLLTDFSKVSINLNPYRLRVDGLNQQLTNEELFIALKNIVKRRGISYLDDASEDGGTVSSDYGKAVEENRKLLAEQTPGQIQLERFEKYGQVRGDFTVVENGEKRRLINVFSTSAYRKEAERILRKQQEFNSKITDEFIEDCLKILTGKRKYYHGPGNEKSRTDYGRFRTDGTTLDNIFGILIGKCTFYPDEYRASKASYTAQEFNLLNDLNNLTVPTETKKLSEEQKKVIVEYAKEAKTLGASTLLKYIAKMIDASVDQIRGYRVDVNNKPEIHTFEAYRKMQSLETISVGELSRNVLDELAHILTLNTEREGIEEAINTKLKDSFSQDQVLELVQFRKNNSSLFSKGWHNFSLKLMMELIPELYETSEEQMTILTRLGKQKSKEISKRTKYIDEKELTEEIYNPVVAKSVRQAIKIINEATKKHGIFDNIVIEMARENNEEDAKKDYIKRQKANQDEKNAAMEKAAFQYNGKKELPDSIFHGQKELATKIRLWHQQGEKCLYTGKNIPISDLIHNQYKYEIDHILPLSLSFDDSLSNKVLVLATANQEKGQRTPFQALDSMDDAWSYREFKSYVKESKLLGNKKKEYLLTEEDISKIEVKQKFIERNLIDTRYSSRVVLNALQDFYKAHKFDTTISVVRGQFTSQLRRKWGLEKSRETYHHHAVDALIIAASSQLRLWKKQNNPLIAYKEGQFVDSETGEIISLSDDEYKELVFKAPYDHFVDTLSSKTFEDSILFSYQVDSKFNRKISDATIYATRKAKLDKEKSEETYVLGKIKDIYSQAGYDAFIKIYNKDKSKFLMYHKDPQTFEKVIEEILRTYPSKELNDKNKEIPCNPFEKYRQENGPIRKYSKKSNGPEIKSLKYYDNKLGNHIDITPESSDNQVVLQSLKPWRTDVYFNHQTKKYELMGLKYSDLSFEKGSGKYSISNQKYNSIKRIEGIDEQSEFKFTLYKNDLILIKDSENNEQKLFRFNSRNDTAKHYIELKPYDKAKFDGEQELITILGNVAKGGRCLKGLNKSNISIFKVKTDVLGKKHIIKKEGDEPKLKF

SEQ ID NO: 770 - protein, 1026 aa, Streptococcus sp.
MNGLVLGLDIGIASVGVGILEKNSGKIIHANSRLFPAATADNNVERRKNRQARRLNRRKKHRGVRFQDLFEDYGLLTDFSKVSINLNPYRLRVDGLNQQLTNEELFIALKNIVKRRGISYLDDASEDGGAVSSDYGKAVEENRKLLAEQTPGQIQLERFEKYGQVRGDFTVVENGEKRRLINVFSTSAYRKEAEKILRKQQEFNNQITDEFIEDYLKILTGKRKYYHGPGNEKSRTDYGRFRTDGTTLDNIFGVLIGKCTFYPNEYRASKSSYTAQEFNLLNDLNNLTVPTETKKLSEEQKKVIVEYAKEAKTLGASTLLKYIVKMIDASVDQISGYRVDVNNKPEMHTFEVYRKMQSLETISVGELSRNVLDELAHILTLNTEREGIEEAINSKLMGVFSQDQVLELVQFRKNNSSLFSKGWHNFSLKLMMELIPELYETSEEQMTILTRLGKQKSKETSKRTKYIDEKELTEEIYNPVVAKSVRQAIKIINEATKKHGIFDNIVIEMARENNEEDAKKDYIKRQKANQDEKNAAMEKAAFQYNGKKELPGNIFNGHKELATKIRLWHQQGEKCLYTGKTIPISDLIHNQYKYEIDHILPLSLSFDDSLSNKVLVHATANQEKGQRTPFQALDSMDDAWSYREFKSYVKDLKSLSNKKKDYLLTEEDISKIEVKQKFIERNLVDTRYSSRVVLNALQDFYKSHQFDTTISVVRGQFTSQLRRKWGLEKSRETYHHHAVDALIIAASSQLRLWKKQNNPLITYKEGQFIDSQTGEIISLTDDEYKELVFKAPYDHFVDTLHSKTFEDGILFSYQVDSKYNRKISDATIYATRKAKLDKDKSEETYVLGKIKDIYSQAGYDAFIKIYNKDKRKFLMYHKDPQTFEKVIEEILRTYPSKERNDKNKEVPCNPFEKYRQENGPIRKYSKKGNGPEIKCLKYYDNKLGNYIDISPDGSDNQVVLQSLKPWRTDVYFNHQTKKYELMGLKYSDLSFEKGSGKYSISNEKYNSIKRIEGVNEQSEFKFTLYK

SEQ ID NO: 771 - protein, 1377 aa, Streptococcus sp.
MNNKPYSIGLDIGTNSVGWSVITDDYKVPSKKMKVLGNTDKRFIKKNLIGALLFDEGTTAEARRLKRTARRRYTRRKNRLRYLQEIFAEEMSKVDSSFFHRLDDSFLIPEDKRGSKYPIFATLVEEKEYHKQFPTIYHLRKQLADSKEKADLRLIYLVLAHMIKYRGHFLYEEAFDIKNNDIQKIFNEFISIYDNTFEGSSLSGQNAQVETIFTDKISKSAKRERVLKLFPDEKSTGLFSEFLKLIVGNQADFKKHFDLEEKAPLQFSKDTYDEDLENLLEQIGDDFADLFVAAKKLYDAILLSGILTVTDPSTKAPLSASMIERYENHQKDLAVLKQFIKTNLPEKYVEVFSDQSKDGYAGYIDGKTTQEAFYKYIKNLLSKFDGADYFLDKIEREVFLRKQRTFDNGSIPHQIHLQEMNTILRRQGEHYPFLKENKEKIEKILTFRIPYHVGPLARGNRDFAWLTRNSDQAIRPWNFEEIVDKASSAEDFINKMTNYDLYLPEEKVLPKHSLLYETFAVYNELTKVKFIAEGMRDYQFLDSGQKKKIINQLFKKKRKVTEDDIIDCLQKIDNYDGIELKGIEKQFNASLSTYHDILKIIRDKEFMDDPKNGDILENVIHTLTIFEDREMIKQRLAQYNSIFDEKVIKALSRKHYTGWGKLSAKLIDGIRDKQTGKTILDYLMDDGKSNRNFMQLIKDDELSFTEIIQKAQVVGDTDNLRQVVQNLPGSPAIKKGILQSIKIVDELVKVMGHAPESIVIEMARENQTTARGKKNSQQRYKRIEDSLKNLASGLDSNILKENPTDNIQLQNDRLFLYYLQNGKDMYTGEALNINQLSSYDIDHIIPQAFIKDDSLDNRVLTSSKDNRGKSDNVPSLEVVEKMKAFWQQLLDSKLISERKYNNLTKAERERGGLNELDKVGFIKRQLVETRQITKHVAQILDARFNKEVTEKNKKNRNVKIITLKSNMVSNFRKEFGLYKVREINDYHHAHDAYLNAVVAKAILKKYPKLEPEFVYGDYQKYDLKRYISRSKDPKEVEKATEKYFFYSNLLNFFKEEVHYADGTIVKRENIEYSKDTGEIAWNKEKDFATIKKVLSLPQVNIVKKTEEQTVGQNGGLFDNNIVSKKKVVDASKLIPIKSGLSPEKYGGYARPTIAYSVLVTYKQNNKIKNTMVGIPVLTKLEFERDPNLYLRNLGINNVSHVIKLVKYTVLEFKHKYGTYRRFIVSNQELKRANQIFVTTKQMKLISQYTTLDKNEHDSLLKNNQQLIQSIWNQFLEFMLATDLVNKKQYDELILTNNQTIEECRNIMNRVITTLSFTNINAGQKKIIFDDTLSLPIKRWQFTDSDKMVKKIIESTLIHQSITGLYETRIDLSKLGED

SEQ ID NO: 772 - protein, 1371 aa, Streptococcus sp.
MNNNNYSIGLDIGTNSVGWAVITDDYKVPSKKMRVLGNTDKRFIKKNLIGALLFDEGTTAEDRRLKRTARRRYTRRKNRLRYLQEIFAEEMSKVDSSFFHRLDDSFLVPEDKSGSKYPIFATLAEEKEYHKKFPTIYHLRKHLADSKEKADLRLIYLALAHITKYRGHFLYEEAFDIKNNDIQKIFNEFINIYDNTFEGSSLSGQNAQVEAIFTGKISKSVKREHVLKLFPDEKSTGLFSEFLKLIVGNQADFKKHFDLEEKASLQFSKDTYDEDLENLLGQIGDDFADLFLVAKKLYDAILLSGILTVTDPSTKAPLSASMIERYENHQEDLAALKQFIKNNLPEKYAEVFSDQSKDGYAGYIDGKTTQEAFYKYIKNLLSKFEGADYFLDKIEREDFLRKQRTFDNGSIPHQIHLQEMNAILRRQGEHYPLLKENKEKIEKILTFRIPYYVGPLARGNRDFAWLTRNSDQAIRPWNFEEIVDKASSAESFINKMTNYDLYLPEEKVLPKHSLLYETFAVYNELTKVKFIAEGLRDYQFFDSGQKKQIVNQLFKEKRKVTEKDIIHYLHNVDGYDGIELKGIEKQFNASLSTYHDLLKIIKDKEFMDNHKNQEILENIVHTLTIFEDREMIKQRLAQYDSIFDEKVIKALTRRHYTGWGKLSAKLINGICDKKTGKTILDYLIDDGYNNRNFMQLINDDGLSFKEIIQKAQVVGKTDDLTQVVRELSGSPAIKKGILQSIKIVDELVKIMGYAPESIVIEMARENQTTAKGKKNSQQRYKRIEDALKNLAPGLDSTISKENPTDNIQLQNDRLFLYYLQNGKDMYTGEALDINQLSSYDIDHIIPQAFIKDDSLDNRVLTSSKDNRGKSDNVPSLEVVKKRKAFWQQLLDSKLISERKFNNLTKAERGGLDERDKVGFIKRQLVETRQITKHVARILDARFNTEVSEKNQKIRSVKIITLKSNLVSNFRKEFKLYKVREINDYHHAHDAYLNAVVAKAILKKYPKLEPEFVYGDYQKYDLKRYISKSKDPKEVEKATEKYFFYSNLLNFFKEEVHYADGTIVKRENIEYSKDTGEIAWNKEKDFVTIKKVLSYPQVNIVKKREVQTGGFSKESILPKGNSDKLIPRKTKDILWDTTKYGGFDSPVIAYSILLIADIEKGKAKKLKTVKTLVGITIMEKAAFEKNPITFLENKGYHNVRKENILCLPKYSLFELENGRRRLLASAKELQKGNEIVLPVYLTTLLYHSKNVHKLDEPEHLEYIQKHRYEFKDLLNLVSEFSQKYVLAEANLEKIKSLYVDNEQADIEILANSFINLLTFTALGAPAAFKFFGKDVDRKRYTTVSEILNATLIHQSITGLYETRIDLSKLGED

SEQ ID NO: 773 - protein, 1139 aa, Streptococcus sp.
MSDLVLGLDIGIGSVGVGILNKVTGEIIHKNSRIFPAAQAENNLERRTNRQGRRLTRRKKHRRVRLNHLFEESGLITDFTKVSINLNPYQLRVKGLTAELSNEELFIALKNMVKHRGISYLDDASDDGNSSVGDYAQIVKENSKQLETKTPGQIQLERYQKYGQLRGDFTVEEDGRKHRLINVFPTSAYHAEALRILQTQQEFNPQITDEFINSYLEILTGKRKYYHGPGNEKSRTDYGKYTTKKDAQGQYITLNNIFGILIGKCTFYPEEYRAAKASYTAQEFNLLNDLNNLTVPTETKKLSEEQKYQIITYVKNEKAMGPAKLFKYIAKLLSCDVADIKGYRIDKSDKAEIHTFEAYRKMKTLETLDVKKMAREELDKLAYVLTLNTEREGIQEALDHEFADGTFSQEQVDELVQFRKANSSIFGKGWHSFSVKLMMELIPELYATSEEQMTILTRLGKQKTTSSSNKTKYIDEKQLTEEIYNPVVAKSVRQAIKIVNAAIKKYGDFDNIVIEMARETNEDDEKKAIQKIQKANKAEKDAAMRKAANQYNGKAELPHSVFHGHKQLATKIRLWHQQGERCLYTGKTISIHDLINNPNQFEIDHILPLSITFDDSLANKVLVYATANQEKGQRTPYQALDSMDDAWSFRELKAFVRESKALSNKKKEYLLTEEDISKFDVRKKFIERNLVDTRYASRVVLNALQEHFRTHKIDTKVSVVRGQFTSQLRRHWGIEKTRDTYHHHAVDALIIAASSQLNLWKKQKNTLVSYSEDQLLDIETGELISDDEYKESVFKAPYQHFVDTLKSKEFEDSILFSYQVDSKFNRKISDATIYATRKAKLDKEKKEYTYTLGKIKDIYALGTKTPSKTGFYKFLDLYKKDKSQFLMYQKDRRTWDEVIEKILEQYRPFKEKDKNGKEVDFNPFEKYRIENGPIRKYSRKGNGPEIKSLKYYDNLLGRFVDITPSESKNPVALLSLNPWRTDVYYNTETRKYEFLGLKYADLCFEKGGSYGISKVKYNKIREKEGIGKNSEFKFTLYKNDLILIKDTETNRQQIFRFWSRTGKDNPKSFEKHKLELKPYEKTRFEKGEELKVLGKVPPSSNRLQKNMQIENLSIYKVRTDVLGNQHIIKNEGDKPKLDF

SEQ ID NO: 774 - protein, 1375 aa, Streptococcus sp.
MSNKSYSIGLDIGTNSVGWAVITDDYKVPSKKMKVLGNTDKHFIKKNLIGALLFDEGTTAEDRRLKRTARRRYTRRKNRLRYLQEIFSQEISKVDSSFFHRLDDFFLVPEDKRGSKYPIFATLVEEKEYHKKFPTIYHLRKHLADSKEKTDLRLIYLALAHMIKYRGHFLYEESFDIKNNDIQKIFSEFISIYDNTFEGKSLSGQNAQVEAIFTDKISKSTKRERVLKLFPDEKSTGLFSEFLKLIVGNQADFKKHFDLEEKAPLQFSKDTYDEDLENLLGQIGDDFADLFLVAKKLYDAILLSGILTVKDLSTKAPLSASMIERYENHQKDLAALKQFIQNNLQEKYDEVFSDQSKDGYAGYIDGKTTQEAFYKYIKNLLSKFEGADYFLDKIEREDFLKKQRTFDNGSIPHQIHLQEMNAIIRRQGEHYPFLQENKEKIEKILTFRIPYYVGPLARGNGDFAWLTRNSDQAIRPWNFEEIVDQASSAEDFINKMTNYDLYLPEEKVLPKHSLLYETFAVYNELTKVKFIAEGLTRYQFLDKKQKKDIFDTFFKAENKRKVTEKDIIHYLHNVDGYDGIELKGIEKQFNASLSTYHDLLKIIKDKAFMDDSKNEEILENIIHTLTIFEDREMIKQRLAQYDSLFDEKVIKALTRRHYTGWGKLSAKLINGIRDKKSGKTILDYLIDDGEINRNFMQLIHDDGLSFKEIIQKAQVFGKTNDVKQVVQELPGSPAIKKGILQSIKIVDELVKVMGHAPESIVIEMARENQTTARGKKNSQQRYKRIEDSLKNLASGLDSNILKENPTDNIQLQNDRLFLYYLQNGRDMYTGKPLEINQLSNYDIDHIIPQAFIKDDSLDNRVLTSSKDNRGKSDNVPSLEVVEKMKAFWQQLLDSKLISERKFNNLTKAERERGGLNELDKVGFIKRQLVETRQITKHVAQFLDARFNKEVTEKDKKNRNVKIITLKSNLVSNFRKEFGLYKVREINDYHHAHDAYLNAVLAKAILKKYPKLEPEFVYGDYQKYDLQRYISKSREPKEVEKATQKYFFYSNLLNFFKEEVHYADGTIVKRENIEYSKDTGEIAWNKEKDFATVKKVLSLPQVNIVKKTEVQTGGFSKESILPKGNSDKLIPRKTKEILWDTTKYGGFDSPVIAYSILLIADIEKGKAKKLKTVKTLVGITIMEKATFEKNPITFLENKGYHNVRKENILCLPKYSLFELESGRRRMLASAKELQKGNEIVLPVYLTTLLYHSKNVHKLDEPEHLEYIQKHRYEFKDLLNLVSEFSQKYVLADANLEKIKNLYADNEQADIEILANSFINLLTFTALGAPAAFKFLGKDVDRKRYTTVSEILNATLIHQSITGLYETRIDLSKLGED

SEQ ID NO: 775 - protein, 206 aa, Streptococcus sp.
RTPFQALDSMDDAWSYREFKSYVKESKLLGNKKKEYLLTEEDISKIEVKQKFIERNLIDTRYSSRVVLNALQDFYKAHKFDTTISVVRGQFTSQLRRKWGLEKSRETYHHHAVDALIIAASSQLRLWKKQNNPLIAYKEGQFVDSETGEIISLSDDEYKELVFKAPYDHFVDTLSSKTFEDSILFSYQVDSKFNRKISDATIYATR

SEQ ID NO: 776 - protein, 1122 aa, Streptococcus suis
MSNGKILGLDIGIASVGVGVIDAQTGEIIHASSRIFPSANAANNAERRTFRGSRRLIRRKKHRIKRLDDLFNDFHINLDGEMSTDNPYVLRVKGLSQKLTVEELYISIKNIMKRRGISYLDDAESDNEAGRSDYAKAIERNRQLLTSKTPGEIQLERLEKYGQLRGNFTIIDEEGQSQQIINVFSTSDYVKEVEKILDCQKMYHKFISDEFCDKLIELLREKRKYYVGPGNEKSRTDYGIYRTDGTTLENLFGILIGKCTFYPDQYRSSRASYTAQEFNFLNDLNNLTVPTETKKLSQEQKEFLVNYAKETSVLGAGKILQQIAKLADCKVEDIRGYRLDNKDKPELHTFETYRAMKGLVPLVDIGVLSREQLDILADILTLNTDFEGIREALKKQLPNVFDEKQVKGLASFRKSKSQLFAKGWHNLSQKIMLEVIPELYATSDEQMTILTRLGKFEKSSVAEYPSSINVDEITDEIYNPVVAKSIRQTIKIINASIKKWDEFDQIVIEMPRDRNEDEEKKRIADGQKANAKEKADSILRAAELYCAGKVLPDYVYNGHNQLATKIRLWYQQGERCIYTGQPISIHDLIHNQNQYEIDHILPLSLTFDDSLSNKVLVLATANQEKAQRTPYNYLKSATSAWSYREFKDYVTKRKGIGKKKCEYLTFEEDINGFEVRSKFIQRNLVDTRYASKVILNALQDYFKISGIQTKVSVVRGQFTSQLRHKWGIEKTRETYHHHAVDALIIAASSQLRLWKKQESPLVVDYQEGRQVDLETGEILELTDEQYKELVYQPPYQGFVNTISSSAFDNEILFSYQVDSKVNRKISDATIYATRNAQLGKDKTEGIYVLGKIKDIYTQAGYEAFLKRYTKDKTSFLMYHKDLDTWEKVIEIILRDYREYDEKGKEIGNPFERYRRENGYVKKYSRKGNGTAIKSLKYYDNKLGNHIDITPENSRNAVVLQSLKPWRTDVYFNKETGKYEFLGIKYSDLSFEKGTGEYGISQEKYDSIKIAEGVAKKSIFKFTLYKQDLLFIKDIENNFGKLLRFTSKNDTSKHYVELKPYDKNKFGTEEPLLPVLGNVAKSGQCIKGLNKSNISIYKVRTDILGYRHFIKQEGEHPQLKFKK

SEQ ID NO: 777 - protein, 1381 aa, Streptococcus suis
MVKKKYAIGIDIGTNSVGWSIVTDDYKVPSKKMKVFGNTEKRYIKKNLLGTLLFDEGNTAENRRLKRTARRRYTRRRNRILYLQEIFAEEINKIDDSFFQRLDDSFLIVEDKQGSKHPIFGTLQEEKEYHKQFPTIYHLRKQLADSSQKADIRLIYLALAHIIKYRGHFLFEGDLKSENKDVQHLFNDFVEMFDKTVEGSYLSENLPNVADVLVEKVSKSRRLENILHYFPNEKKNGLFGNFLALALGLQPNFKTNFELAEDAKIQFSKETYEEDLEELLGKIGDDYADLFIATKSLYDGILLAGILSTTDSTTKAPLSSSMVNRYEEHQKDLALLKNFIHQNLSDSYKEVFNDKLKDGYAGYIEGKTTQENFYRFIKKAIEKIEGSNYFIDKIDREDFLRKQRTFDNGSIPHQIHLQEMHAIIRRQAEFYPFLVENQDKIEKILTFRIPYYVGPLARGKSEFAWLNRKSDEKIRPWNFDEMVDKETSAENFITRMTNYDRYLPDQKVLPKHSLLYEKFAVYNELTKVKFIAEGMRDYQFLDSGQKKDIVKTLFKTKRKVTAKDIKAYLENSNGYAGVELKGLEEQFNASLPTYHDLLKILRDKAFIDAEENQEILEDIVLTLTLFEDREMIRKRLEKYKDILTEEQRKKLERRHYTGWGRLSAKLINGILDKVTRKTILGYLIDDGTSNRNFMQLINDDTLSFVDEIRLAQGSGEAEDYRAEVQNLAGSPAIKKGILQSLKIVDELIEVMGYEPEHIVVEMARENQFTNQGRRNSQQRINRLENALKDFGSKILEEQKPYGVSKVNNIHLQSDRLFLYYLQNGKDMYTDEELDIDHLSEYDIDHIIPQAFIKDDSLDNKVLTKSAKNRGKSDDVPSMEIVHNRKNFWRQLLKSKLISQRKFDNLTKAERGGLTNEDKARFIQRQLVETRQITKHVARMLDTRFNTKLDEAGNRIRDPKVNIITLKSNLVSQFRKDYQLYKIREINNYHHAHDAYINAVVATALLKKYPQLAPEFVYGEYPTYNSYNSRKSATEKVLFYSNIMNFFKRIVVHSKTGEVRIRPVIEVNKETGEIVWDKKSDFRTVRKVLSYPQVNVVKKTEVQNHGLDRGKPKGFYNANLSPRPKEGSVENLVPAKQSFDTKRYGGYAGISNSYAVLVNGIIEKGKKKSKAEVTEFQGISILARKDFDKNPKQYLLNLGYKDIKSIIKLPKYSLFELENGSRRMLASILSTNNKRGEIHKGNEMYLPDKFVTLLYHAMRVNRTLEPGHKKYVETHRHVFDELLIYILEYNEKIVGAKANGKRIVEAYSARKDTDNLEELCNSFINLLNLTALGSAVDFEFLGTKIPRYRDYTPSSLLKATLIHQSVTGLYETRIDLSKLGGD

SEQ ID NO: 778 - protein, 39 aa, Streptococcus thermophilus
GRCIKGLGKSNISIYKVRTDVLGNQHIIKNEGDKPKLDF

SEQ ID NO: 779 - protein, 302 aa, Streptococcus thermophilus
MIRRKKHRIVRLNRLFEESGLITDFTKISINLNPYQLRVKGLTDELSNEELFIALKNMVKHRGISYLDDASDDGNSSVGDYAQIVKENSKQLETKTPGQIQLERYQTYGQLRGDFTVEKDGKKHRLINVFPTSAYRSEALRILQTQQEFNPQITDEFINRYLEILTGKRKYYHGPGNEKSRTDYGRYRTSGETLDNIFGILIGKCTFYPDEFRAAKASYTAQEFNLLNDLNNLTVPTETKKLSKEQKNQIINYVKNEKAMGPAKLFKYIAKLLSCDVADIKGYRIDKSGKAERFILSKPIEK

SEQ ID NO: 780 - protein, 1121 aa, Streptococcus thermophilus
MSDLVLGLDIGIGSVGVGILNKVTGEIIHKNSRIFPAAQAENNLVRRTNRQGRRLTRRKKHRIVRLNRLFEESGLITDFTKISINLNPYQLRVKGLTDELSNEELFIALKNMVKHRGISYLDDASDDGNSSVGDYAQIVKENSKQLETKTPGQIQLERYQTYGQLRGDFTVEKDGKKHRLINVFPTSAYRSEALRILQTQQEFNPQITDEFINRYLEILTGKRKYYHGPGNEKSRTDYGRYRTSGETLDNIFGILIGKCTFYPDEFRAAKASYTAQEFNLLNDLNNLTVPTETKKLSKEQKNQIINYVKNEKAMGPAKLFKYIAKLLSCDVADIKGYRIDKSGKAEIHTFEAYRKMKTLETLDIEQMDRETLDKLAYVLTLNTEREGIQEALEHEFADGSFSQKQVDELVQFRKANSSIFGKGWHNFSVKLMMELIPELYETSEEQMTILTRLGKQKTTSSSNKTKYIDEKLLTEEIYNPVVAKSVRQAIKIVNAAIKEYGDFDNIVIEMARETNEDDEKKAIQKIQKANKDEKDAAMLKAANQYNGKAELPHSVFHGHKQLATKIRLWHQQGERCLYTGKTISIHDLINNSNQFEVDHILPLSITFDDSLANKVLVYATANQEKGQRTPYQALDSMDDAWSFRELKAFVRESKTLSNKKKEYLLTEEDISKFDVRKKFIERNLVDTRYASRVVLNALQEHFRAHKIDTKVSVVRGQFTSQLRRHWGIEKTRDTYHHHAVDALIIAASSQLNLWKKQKNTLVSYSEDQLLDIETGELISDDEYKESVFKAPYQHFVDTLKSKEFEDSILFSYQVDSKFNRKISDATIYATRQAKVGKDKADETYVLGKIKDIYTQDGYDAFMKIYKKDKSKFLMYRHDPQTFEKVIEPILENYPNKQMNEKGKEVPCNPFLKYKEEHGYIRKYSKKGNGPEIKSLKYYDSKLGNHIDITPKDSNNKVVLQSVSPWRADIYFNNTTGKYEILGLKYADLQFEKGTGTYKISQEKYNDIKKKEGVDSDSEFKFTLYKNDLLLVKETETKEQQLFRFLSRTMPKQKHYVELKPYDKQKFEGGEALIKVLGNVANGGQCIKGLGKSNISIYKVRTDVLGNQHIIKNEGDKPKLDF

SEQ ID NO: 781 - protein, 1121 aa, Streptococcus thermophilus
MSDLVLGLDIGIGSVGVGILNKVTGEIIHKNSRIFPAAQAENNLVRRTNRQGRRLTRRKKHRIVRLNRLFEESGLITDFTKISINLNPYQLRVKGLTDELSNEELFIALKNMVKHRGISYLDDASDDGNSSVGDYAQIVKENSKQLETKTPGQIQLERYQTYGQLRGDFTVEKDGKKHRLINVFPTSAYRSEALRILQTQQEFNPQITDEFINRYLEILTGKRKYYHGPGNEKSRTDYGRYRTSGETLDNIFGILIGKCTFYPDEFRAAKASYTAQEFNLLNDLNNLTVPTETKKLSKEQKNQIINYVKNEKAMGPAKLFKYIAKLLSCDVADIKEYRIDKSGKAEIHTFEAYRKMKTLETLDIEQMDRETLDKLAYVLTLNTEREGIQEALEHEFADGSFSQKQVDELVQFRKANSSIFGKGWHNFSVKLMMELIPELYETSEEQMTILTRLGKQKTTSSSNKTKYIDEKLLTEEIYNPVVAKSVRQAIKIVNAAIKEYGDFDNIVIEMARETNEDDEKKAIQKIQKANKDEKDAAMLKAANQYNGKAELPHSVFHGHKQLATKIRLWHQQGERCLYTGKTISIHDLINNSNQFEVDHILPLSITFDDSLANKVLVYATANQEKGQRTPYQALDSMDDAWSFRELKAFVRESKTLSNKKKEYLLTEEDISKFDVRKKFIERNLVDTRYASRVVLNALQEHFRAHKIDTKVSVVRGQFTSQLRRHWGIEKTRDTYHHHAVDALIIAASIQLNLWKKQKNTLVSYSEDQLLDIETGELISDDEYKESVFKAPYQHFVDTLKSKEFEDSILFSYQVDSKFNRKISDATIYATRQAKVGKDKADETYVLGKIKDIYTQDGYDAFMKIYKKDKSKFLMYRHDPQTFEKVIEPILENYPNKQINEKGKEVPVNPFLKYKEEHGYIRKYSKKGNGPEIKSLKYYDSKLGNHIDITPKDSNNKVVLQSVSPWRADVYFNKTTGKYEILGLKYADLQFEKGTGTYKISQEKYNDIKKKEGVDSDSEFKFTLYKNDLLLVKDTETKEQQLFRFLSRTMPKQKHYVELKPYDKQKFEGGEALIKVLGNVANSGQCKKGLGKSNISIYKVRTDVLGNQHIIKNEGDKPKLDF

SEQ ID NO: 782 - protein, 1121 aa, Streptococcus thermophilus
MSDLVLGLDIGIGSVGVGILNKVTGEIIHKNSRIFPAAQAENNLVRRTNRQGRRLTRRKKHRRVRLNRLFEESGLITDFTKISINLNPYQLRVKGLTDELSNEELFIALKNMVKHRGISYLDDASDDGNSSVGDYAQIVKENSKQLETKTPGQIQLERYQTYGQLRGDFTVEKDGKKHRLINVFPTSAYRSEALRILQTQQEFNPQITDEFVNRYLEILTGKRKYYHGPGNEKSRTDYGRYRTNGETLDNIFGILIGKCTFYPEEFRAAKASYTAQEFNLLNDLNNLTVPTETKKLSKEQKNQIINYVKNEKAMGPAKLFKYIAKLLSCDVADIKGYRIDKSGKAEIHTFEAYRKMKTLETLDIEQMDRETLDKLAYVLTLNTEREGIQEALEHEFADGSFSQKQVDELVQFRKANSSIFGKGWHNFSVKLMMELIPELYETSEEQMTILKRLGKQKTTSSSNKTKYIDEKLLTEEIYNPVVAKSIRQAIKIVNAAIKEYGDFDNIVIEMARETNEDDEKKAIQKIQKANKDEKDAAMLKAANQYNGKAELPHSVFHGHKQLATKIRLWHQQGERCLYTGKTISIHDLINNPNQFEVDHILPLSITFDDSLANKVLVYATANQEKGQRTPYQALDSMDDAWSFRELKAFVRESKTLSNKKKEYLLTEEDISKFDVRKKFIERNLVDTRYASRVVLNALQEHFRAHKIDTKVSVVRGQFTSQLRRHWGIEKTRDTYHHHAVDALIIAASSQLNLWKKQKNTLVSYSEDQLLDIETGELISDDEYKESVFKAPYQHFVDTLKSKEFEDSILFSYQVDSKFNRKISDATIYATRQAKVGKDKKDETYVLGKIKDIYTQDGYDAFMKIYKKDKSKFLMYRHDPQTFEKVIEPILENYPNKEMNEKGKEVPCNPFLKYKEEHGYIRKYSKKGNDPEIKSLKYYDSKLGNHIDITPKDSNNKVVLQSVSPWRADVYFNKTTGKYEILGLKYADLQFEKGTGTYKISQEKYNDIKKKEGVDSDSEFKFTLYKNDLLLVKDTETKEQQLFRFLSRTMPKQKHYVELKPYDKQKFEGGEALIKVLGNVANSGQCKKGLGKSNISIYKVRTDVLGNQHIIKNEGDKPKLDF

SEQ ID NO: 783 - protein, 1122 aa, Streptococcus thermophilus
MSDLVLGLDIGIGSVGVGILNKVTGEIIHKNSRIFPAAQAENNVERRTNRQGRRLTRRKKHRRVRLNRLFEESGLITDFTKISINLNPYQLRVRGLTDELSNEELFIALKNMVKHRGISYLDDASDDGNSSVGDYAQIVKENSKQLETKTPGQIQLERYQTYGQLRGDFTVEKDGKKHRLINVFPTSAYRSEALRILQTQQEFNSQITDEFINRYLEILTGKRKYYHGPGNEKSRTDYGRYRTSGETLDNIFGILIGKCTFYPEEFRAAKASYTAQEFNLLNDLNNLTVPTETKKLSKEQKNQIINYVKNEKAMGPAKLFKYIAKLLSCDVADIKGYRIDKSGKAEIHTFEAYRKMKTLETLDIEQMDRETLDKLAYVLTLNTEREGIQEALEHEFADGSFSQKQVDELVQFRKASSSIFGKGWHNFSVKLMMELIPELYETSEEQMTILTRLGKQKTTSSSNKTKYIDEKLLTEEIYNPVVAKSVRQAIKIVNAAIKEYGDFDNIVIEMARETNEDDEKKAIQKIQKANKDEKDAAMLKAANQYNGKAELPHSVFHGHKQLATKIRLWHQQGERCLYTGKTISIHDLINNPNQFEVDHILPLSITFDDSLANKVLVYATANQEKGQRTPYQALDSMDDAWSFRELKAFVRESKTLSNKKKEYLLTEEDISKFDVRKKFIERNLVDTRYASRVVLNALQEHFRAHKIDTKVSVVRGQFTSQLRRHWGIEKTRDTYHHHAVDALIIAASSQLNLWKKQKNTLVSYSEDQLLDIETGELISDDEYKESVFKAPYQHFVDTLKSKEFEDSILFSYQVDSKFNRKLSDATIYATRQAKVGKDKKDETYVLGKIKDIYTQDGYDAFMKIYKKDKSKFLMYRHDPQTFEKVIEPILENYPNKEMNEKGKEVPCNPFLKYKEEHGYIRKYSKKGNGPEIKSLKYYDSKLLGNPIDITPENSKNKVVLQSLKPWRADVYFNKTTGKYEILGLKYADLQFEKKTGTYKISQEKYNGIMKEEGVDSDSEFKFTLYKNDLLLVKDTETKEQQLFRFLSRTMPNVKYYVELKPYSKDKFEKNESLIEILGSADKSGRCIKGLGKSNISIYKVRTDVLGNQHIIKNEGDKPKLDF

SEQ ID NO: 784 - protein, 1388 aa, Streptococcus thermophilus
MTKPYSIGLDIGTNSVGWAVITDNYKVPSKKMKVLGNTSKKYIKKNLLGVLLFDSGITAEGRRLKRTARRRYTRRRNRILYLQEIFSTEMATLDDAFFQRLDDSFLVPDDKRDSKYPIFGNLVEEKAYHDEFPTIYHLRKYLADSTKKADLRLVYLALAHMIKYRGHFLIEGEFNSKNNDIQKNFQDFLDTYNAIFESDLSLENSKQLEEIVKDKISKLEKKDRILKLFPGEKNSGIFSEFLKLIVGNQADFRKCFNLDEKASLHFSKESYDEDLETLLGYIGDDYSDVFLKAKKLYDAILLSGFLTVTDNETEAPLSSAMIKRYNEHKEDLALLKEYIRNISLKTYNEVFKDDTKNGYAGYIDGKTNQEDFYVYLKNLLAEFEGADYFLEKIDREDFLRKQRTFDNGSIPYQIHLQEMRAILDKQAKFYPFLAKNKERIEKILTFRIPYYVGPLARGNSDFAWSIRKRNEKITPWNFEDVIDKESSAEAFINRMTSFDLYLPEEKVLPKHSLLYETFNVYNELTKVRFIAESMRDYQFLDSKQKKDIVRLYFKDKRKVTDKDIIEYLHAIYGYDGIELKGIEKQFNSSLSTYHDLLNIINDKEFLDDSSNEAIIEEIIHTLTIFEDREMIKQRLSKFENIFDKSVLKKLSRRHYTGWGKLSAKLINGIRDEKSGNTILDYLIDDGISNRNFMQLIHDDALSFKKKIQKAQIIGDEDKGNIKEVVKSLPGSPAIKKGILQSIKIVDELVKVMGGRKPESIVVEMARENQYTNQGKSNSQQRLKRLEKSLKELGSKILKENIPAKLSKIDNNALQNDRLYLYYLQNGKDMYTGDDLDIDRLSNYDIDHIIPQAFLKDNSIDNKVLVSSASNRGKSDDFPSLEVVKKRKTFWYQLLKSKLISQRKFDNLTKAERGGLLPEDKAGFIQRQLVETRQITKHVARLLDEKFNNKKDENNRAVRTVKIITLKSTLVSQFRKDFELYKVCEINDFHHAHDAYLNAVIASALLKKYPKLEPEFVYGDYPKYNSFRERKSATEKVYFYSNIMNIFKKSISLADGRVIERPLIEVNEETGESVWNKESDLATVRRVLSYPQVNVVKKVEEQNHGLDRGKPKGLFNANLSSKPKPNSNENLVGAKEYLDPKKYGGYAGISNSFAVLVKGTIEKGAKKKITNVLEFQGISILDRINYRKDKLNFLLEKGYKDIELIIELPKYSLFELSDGSRRMLASILSTNNKRGEIHKGNQIFLSQKFVKLLYHAKRISNTINENHRKYVENHKKEFEELFYYILEFNENYVGAKKNGKLLNSAFQSWQNHSIDELCSSFIGPTGSERKGLFELTSRGSAADFEFLGVKIPRYRDYTPSSLLKDATLIHQSVTGLYETRIDLAKLGEG

SEQ ID NO: 785 - protein, 1388 aa, Streptococcus thermophilus
MTKPYSIGLDIGTNSVGWAVITDNYKVPSKKMKVLGNTSKKYIKKNLLGVLLFDSGITAEGRRLKRTARRRYTRRRNRILYLQEIFSTEMATLDDAFFQRLDDSFLVPDDKRDSKYPIFGNLVEEKAYHDEFPTIYHLRKYLADSTKKADLRLVYLALAHMIKYRGHFLIEGEFNSKNNDIQKNFQDFLDTYNAIFESDLSLENSKQLEEIVKDKISKLEKKDRILKLFPGEKNSGIFSEFLKLIVGNQADFRKCFNLDEKASLHFSKESYDEDLETLLGYIGDDYSDVFLKAKKLYDAILLSGFLTVTDNETEAPLSSAMIKRYNEHKEDLALLKEYIRNISLKTYNEVFKDDTKNGYAGYIDGKTNQEDFYVYLKNLLAEFEGADYFLEKIDREDFLRKQRTFDNGSIPYQIHLQEMRAILDKQAKFYPFLAKNKERIEKILTFRIPYYVGPLARGNSDFAWSIRKRNEKITPWNFEDVIDKESSAEAFINRMTSFDLYLPEEKVLPKHSLLYETFNVYNELTKVRFIAESMRDYQFLDSKQKKDIVRLYFKDKRKVTDKDIIEYLHAIYGYDGIELKGIEKQFNSSLSTYHDLLNIINDKEFLDDSSNEAIIEEIIHTLTIFEDREMIKQRLSKFENIFDKSVLKKLSRRHYTGWGKLSAKLINGIRDEKSGNTILDYLIDDGISNRNFMQLIHDDALSFKKKIQKAQIIGDEDKGNIKEVVKSLPGSPAIKKGILQSIKIVDELVKVMGGRKPESIVVEMARENQYTNQGKSNSQQRLKRLEKSLKELGSKILKENIPAKLSKIDNNALQNDRLYLYYLQNGKDMYTGDDLDIDRLSNYDIDHIIPQAFLKDNSIDNKVLVSSASNRGKSDDFPSLEVVKKRKTFWYQLLKSKLISQRKFDNLTKAERGGLLPEDKAGFIQRQLVETRQITKHVARLLDEKFNNKKDENNRAVRTVKIITLKSTLVSQFRKDFELYKVREINDFHHAHDAYLNAVIASALLKKYPKLEPEFVYGDYPKYNSFRERKSATEKVYFYSNIMNIFKKSISLADGRVIERPLIEVNEETGESVWNKESDLATVRRVLSYPQVNVVKKVEEQNHGLDRGKPKGLFNANLSSKPKPNSNENLVGAKEYLDPKKYGGYAGISNSFAVLVKGTIEKGAKKKITNVLEFQGISILDRINYRKDKLNFLLEKGYKDIELIIELPKYSLFELSDGSRRMLASILSTNNKRGEIHKGNQIFLSQKFVKLLYHAKRISNTINENHRKYVENHKKEFEELFYYILEFNENYVGAKKNGKLLNSAFQSWQNHSIDELCSSFIGPTGSERKGLFELTSRGSAADFEFLGVKIPRYRDYTPSSLLKDATLIHQSVTGLYETRIDLAKLGEG

SEQ ID NO: 786 - protein, 595 aa, Streptococcus thermophilus
MVQFRKANSSIFGKGWHNFSVKLMMELIPELYETSEEQMTILKRLGKQKTTSSSNKTKYIDEKLLTEEIYNPVVAKSVRQAIKIVNAAIKEYGDFDNIVIEMARETNEDDEKKAIQKIQKANKDEKDAAMLKAANQYNGKAELPHSVFHGHKQLATKIRLWHQQGERCLYTGKTISIHDLINNPNQFEVDHILPLSITFDDSLANKVLVYATANQEKGQRTPYQALDSMDDAWSFRELKAFVRESKTLSNKKKEYLLTEEDISKFDVRKKFIERNLVDTRYASRVVLNALQEHFRAHKIDTKVSVVRGQFTSQLRRHWGIEKTRDTYHHHAVDALIIAASSQLNLWKKQKNTLVSYSEDQFLDIETGELISDDEYKESVFKAPYQHFVDTLKSKEFEDSILFSYQVDSKFNRKISDATIYATRKAKLDKEKKEYTYTLGKIKDIYTQAGYDAFIKIYKKDKSKFLMYHHDPQTFEKVIEPILENYPNKEINEKGKEVPCNPFLKYKEEHGYIRKYSKKGNGPEIKSFKYYDNLLGRHIDITPKNSKNIVALRKLNPWRTDVYFNHETMKYEFLGLKYADISYKKSKNKAGDFLPK

SEQ ID NO: 787 - protein, 1388 aa, Streptococcus thermophilus]
MTKPYSIGLDIGTNSVGWAVITDNYKVPSKKMKVLGNTSKKYIKKNLLGVLLFDSGITAEGRRLKRTARRRYTRRRNRILYLQEIFSTEMATLDDAFFQRLDDSFLVPDDKRDSKYPIFGNLVEEKVYHDEFPTIYHLRKYLADSTKKADLRLVYLALAHMIKYRGHFLIEGEFNSKNNDIQKNFQDFLDTYNAIFESDLSLENSKQLEEIVKDKISKLEKKDRILKLFPGEKNSGIFSEFLKLIVGNQADFRKCFNLDEKASLHFSKESYDEDLETLLGYIGDDYSDVFLKAKKLYDAILLSGFLTVTDNETEAPLSSAMIKRYNEHKEDLALLKEYIRNISLKTYNEVFKDDTKNGYAGYIDGKTNQEDFYVYLKNLLAEFEGADYFLEKIDREDFLRKQRTFDNGSIPYQIHLQEMRAILDKQAKFYPFLAKNKERIEKILTFRIPYYVGPLARGNSDFAWSIRKRNEKITPWNFEDVIDKESSAEAFINRMTSFDLYLPEEKVLPKHSLLYETFNVYNELTKVRFIAESMRDYQFLDSKQKKDIVRLYFKDKRKVTDKDIIEYLHAIYGYDGIELKGIEKQFNSSLSTYHDLLNIINDKEFLDDSSNEAIIEEIIHTLTIFEDREMIKQRLSKFENIFDKSVLKKLSRRHYTGWGKLSAKLINGIRDEKSGNTILDYLIDDGISNRNFMQLIHDDALSFKKKIQKAQIIGDEDKGNIKEVVKSLPGSPAIKKGILQSIKIVDELVKVMGGRKPESIVVEMARENQYTNQGKSNSQQRLKRLEKSLKELGSKILKENIPAKLSKIDNNALQNDRLYLYYLQNGKDMYTGDDLDIDRLSNYDIDHIIPQAFLKDNSIDNKVLVSSASNRGKSDDFPSLEVVKKRKTFWYQLLKSKLISQRKFDNLTKAERGGLLPEDKAGFIQRQLVETRQITKHVARLLDEKFNNKKDENNRAVRTVKIITLKSTLVSQFRKDFELYKVREINDFHHAHDAYLNAVIASALLKKYPKLEPEFVYGDYPKYNSFRERKSATEKVYFYSNIMNIFKKSISLADGRVIERPLIEVNEETGESVWNKESDLATVRRVLSYPQVNVVKKVEEQNHGLDRGKPKGLFNANLSSKPKPNSNENLVGAKEYLDPKKYGGYAGISNSFAVLVKGTIEKGAKKKITNVLEFQGISILDRINYRKDKLNFLLEKGYKDIELIIELPKYSLFELSDGSRRMLASILSTNNKRGEIHKGNQIFLSQKFVKLLYHAKRISNTINENHRKYVENHKKEFEELFYYILEFNENYVGAKKNGKLLNSAFQSWQNHSIDELCSSFIGPTGSERKGLFELTSRGSAADFEFLGVKIPRYRDYTPSSLLKDATLIHQSVTGLYETRIDLAKLGEG

SEQ ID NO: 788 - protein, 1038 aa, Streptococcus vestibularis
MIDELSNEELFIALKNMVKHRGISYLDDASDDGNSSVGDYAQIVKENSKQLETKTPGQIQLERYQKYGQLRGDFTVEEDGKKHRLINVFPTSAYRAEALRILQTQQEFNSQITDEFINRYLEILTGKRKYYHGPGNEKSRTDYGRYRTSGETLDNIFGILIGKCTFYPEEFRAAKASYTAQEFNLLNDLNNLTVPTETKKLSEEQKNQIINYVKNEKAMGPAKLFKYIAKLLSCDIADIKGYRIDKSDKAEIHTFEAYRKMKTLETIDIEKMSREELDKLAYVLTLNTEREGIQEALEHEFVDGNFSQEQIDELVQFRKANSSIFGKGWHNFSVKLMMELIPELYATSEEQMTILTRLGKQKTTSSSNKTKYIDEKLLTEEIYNPVVAKSVRQAIKIVNAAIKEYGDFDNIVIEMARATNEDDEKKAIQKIQKANKDEKDAAMLKAANQYNGKAELPHSVFHGHKQLATKIRLWHQQGERCLYTGKTISIHDLINNPNQFEIDHILPLSITFDDSLANKVLVYATANQEKGQRTPYQALDSMDDAWSFRELKAFVRESKTLSNKKKEYLLTEEDISKFDVRKKFIERNLVDTRYASRVVLNALQEHFRAHKIDTKVSVVRGQFTSQLRRHWGIEKTRDTYHHHAVDALIIAASSQLNLWKKQKNTLVNYSENQLLDIETGELISDDEYKESVFKAPYQHFVDTLKSKEFEDSILFSYQVDSKFNRKISDATIYATRKAKLDKEKKEYTYTLGKIKDIYALGTKTPSKTGFYKFLDLYKKNKSQFLMYQKDRKTWDEVIEKILEQYRPFKEKDKNGKEVDFNPFEKYRIENGPIRKYSRKGNGPEIKSLKYYDNLLGRFVDITPSESKNPVALLSLNPWRTDVYYNTETRKYEFLGLKYADLCFEKGGSYGISKVKYNKIREKEGIGKNSEFKFTLYKNDLILIKDTETNRQQVFRFWSRTGKDNPKRFEKHKIELKPYEKARFEKGEELEVLGKVPPSSNQLQKNMQIENLSIFKVRTDVLGNQHIIKNEGDKPKLDF

SEQ ID NO: 789 - protein, 97 aa, Streptococcus vestibularis
MSDLVLGLDIGIGSVGVGILNKVTGEIIHKNSRIFPAAQAENNVERRTNRQGRRLTRRKKHRRVRLNHLFEESGLITDFTKVSINLNPYQLRVKIDR

SEQ ID NO: 790 - protein, 1084 aa, Subdoligranulum sp.
MKNTLYGIGLDIGVASVGWAVVGLNGTGEPVGLHRLGVRIFDKAEQPKTGESLAAPRRMARGMRRRLRRKALRRADVYALLERSGLSTREELAQMFEAGGLEDIYALRTRALDEPVGKAEFSRILLHLAQRRGFKSNRRTASDGEDGRLLAAVNENRRRMAQGGWRTVGEMLYRHEAFALHKRNKADDYLSTVGRDMVAEEASILFERQRAMGCSWAAPELQAEYLSILLRQRSFDEGPGGNSPYGGNQVEKMVGRCTFEPDEPRAAKAAYSFEYFSLLQKLNHIRLAENGETRPLTQPQRQQLLSLAHKTPDISLARIRKELALPETVQFNGVRCRANETLEESEKKEKFACLPAYHKMRKALDGVVKGRISSLSISQRDAAATALSLYKNEDTLRAKLTEAGFQAPEIDALAGLTGFSKFGHLSLKACRKLIPHLEQGLTYDQACTAAGYDFKGHGAGERAFTLPAAAPEMEQITSPVVRRAVAQTIKVVNGIIREMDASPAWVRIELARELSKTFGERQEMDRSMRENAAQNERLMQELRDTFHLLSPTGQDLVKYRLWKEQDGVCAYSLRRLDVERLFEPGYVDVDHIVPYSLSFDDRRSNKVLVLSSENRQKGNRLPLQYLQGKRREDFIVWTNSSVHDYRKRQNLLREKLSGDEAEGFRQRNLQDTQHMARFLYNYISDHLAFAQSEALGKKRVFAVSGAVTSHLRKRWGLSKVRADGDLHHALDAAVVACTTDGMIRRISGYYGHIEGEYLQDADGAGSQHARTKERFPAPWPRFRDELIVRLSEQPAEPLLDINPEFYCEYGTEHIRPVFVSRMPRRKVTGPGHKETIKGAAAADEGLLTVRKALTELKLDKDGEIKDYYMPSSDTLLYEALKAQLRRFGGDGKKAFAEPFYKPKADGTPGPLVRKVKTTEKATLTVPVHGGAASNDTMVRVDVFLVPGDGYYWVPVYTADTLKPELPNRAVVQGKPYSEWKEMREEDFIFSLYPNDLVYVEHKSGLKFTLQNADSTLEKTRTQTSAFAYFVSGSISTASITIRTHDNAYGIPSLGVKTLKTFHKYQVDVLGNVFPVHKETRQKFR

SEQ ID NO: 791 - protein, 951 aa, Sutterella parvirubra
MPTVRPVFHSSASFDLGAKNTGLFLVNHPAGAAPSAEYAAAYTIVQPADGDGLNYSTTNRRAVRHRLRGGKRFKLARRLVLQVIDALRKLKPGLIRDEEMRRTVEALSSLLKRRGFTRIESEAQVDPTTLDSVDPAVFADHETLGGFFSLGIPISTQWDALSQNPGAVEQLFKALPSAKDFGKYVTEQFPEFAEQKKLYADAIKVLSSEAKSIVMQLGLGHHHRSKYFEMIAHDMLRDPRLQGVFELFGSEERFKTFICNVSNLQLRALRWYFDEPNPEVANQWNPEKFQVVWLRGLKYFHPDAERKADMKKLIDELTASKDILDALCTTDPRRTIPPYEDQNNRRPPFDQTLWLSAAELTRRYGDKWRIWSQKFERADRALSTGLDEILLYTDRRSRMFNRNQDPSVYADSYVLQRVLDRSSKLDRYALRALAAGYRTQELHEPLATLSDTLGTQHVETFLTFAAEYYEEVAAAKNGLWLDGPSRLLERADIHPPMKKKVLDLLLGNILDATPEIGRILRTVLWNRHVHEKSRSTPASLCRSIEAIRKDFGGEFRMRYDALDAKIRAAEDQKKKFKPTNAEEKDLFKAWNATKTMHAFLRDVLQLTPKQLERTASPYVFAQLHTLIDTERDGFTSTSLAAHLENHWRMRANAAGMAQCSRLPADAVRPFDGVLSKALDRQAFEAAKLAAQHLMSRKELTDTDIRYSIIIESNRFAFSASTAELKKNTLAKKNAEKGLNFELKRWQDKDSRIREASRGICAYTGAKLGDVVEYDHIIPRAFTTSAMGSVFNSEANLICVSRPGNQTKADKRYGLNKLHKTYLTAVFGTADVTTIAASIEDIVGKLASANRLRHFELLNEKEQDAVRHALFLDDESDARRIVLRELAAQNKSRVNGTQAWFVRAFMTKLLEITKDWRERTGNTLDIRSWKTDAEVASRLRSALNFHAEITLT

SEQ ID NO: 792 - protein, 406 aa, Sutterella parvirubra
SNLFREEVPYGDHFLPIIQMKNRIYIGYQLPKADGTGGNAVAVLGKDPLELLETLKPFLDREPQAFSDHPVTYKMINERAYELLTKCALTPDQTTELERTQAEVLRSLNYQTSRAAVLGRLVDDKNKFVAKDAVWKEKDFVISFKLSPKKSAFKASGQLELPAKSDWKALVDSPELAINWGQPADDTFSQRIERKVRMNSSHLEHTPKKRVVSLPVVDKPSGGFRIRRHNLDGSAVFQVHTVANNKYGGFSADSAGKVDWSTPVLCGHLQHANLVPLDPETASAEQLVRMSEWRVVETTSDIRLEVCPGTSGRRYVRVELPFTLLQEWLTAGKVADVPVSPLHLPGSIKLTDPKTFCAEAQKTLSIFAQPRATIFFEQLGDRVRFRFEASGGPATMNAAYNAAGRS

SEQ ID NO: 793 - protein, 389 aa, Sutterella wadsworthensis
MKACDLEEKTNHLQACVAIDLGARYTGTFSILHKSSHLPSKDDCRAATYVLPEDGGKMTYSQRNRTAVRHRIRGKKRFALARRMAMLIIREKLAAKSVTLTSSETRRLAEAVGSLLRRRGYNRLETETDNDLTVLENIEPEVFSEHEILGKYFYAGTDLAIQWETLSQDLSKISSLLAERLSEKDFKKYLTGLIPDDKNKIKHIISVFKMLIDEAESINMQCVLGHKHRTQYLSDIHADMHRDTRLSKAAEAFGGVDRLWRLLGNLSNLQLRAHRWYFNAPHLFDDQALEPARLQKTLVRAFKYLHCPQGVESRAQAELVKELEEADDIIDALCTIDPVRTIPPYENQQNRRPPFDQTLYLSPDLGVSGFLCLGRLFQGQPNEAALCFL

SEQ ID NO: 794 - protein, 976 aa, Tannerella sp.
MKKILGLDLGSNSIGWALVNEAENRDEASSIIKLGVRVNPLTVDEMQNFEKGKSITTNADRTLKRSMRRNLQRYKLRRDALIKLLKKVGFITDGTILSEQGNRTTFETYRLRAKAPDEEISLQELARVLLMINKKRGYKSSRKIKEKEAGTLIDGMEVAKKLYDEDLTPGQLCLQLLESGKKSLPDFYSSDLQEEFDRIWNFQKQFNPKAFCDTAKEEIKGKNKSQTWAILAKYFIWMEEMDVWNEKESKTERVEKECKLVGLKRTVKKEEQRKENYCWRVQALTEQLDLEKVAVVLQEINGQISTSSGYLGAISDRSKVLYFNRQTVGQYQMAELEKNPNTSLRNMVFYRQDYLDEFDKIWEKQAEFHKELTVELKKEIRDIIIFYQRRLKSQKGLIGFCEFENREIMVEKNGKMQAKVVGCKVIPRSHPLFQEFKIWQTLNNVEVFAGEKKCKRKRTDAFPGLFDGTEDTLMVEGWRYLYQEEKEILAKELSVKKSLKKEYILKLLFDNPQDLDMNFEQIEGNDTGNVLFSAYSKMIEKYGYEPLDFGKPTDKIIEQLQVIFADLGWNTDLLFVDLNKEGKDLEKQPYFKLWHLLYSFEGDNTPTGNGKLVEKLMELCHVGKECALELVNISFQNDYGSLSAKAIKKILPYLKEGNRYDVACGYAGYRHSKSSLTKEEIENKVLKDKLDILPKNSLRNPVVEKILNQMVNVINAIIDTYGKPDEIRVELARELKKSAKEREELTKAIAKSTREHEEIRKVLQEEFGMINVSRNDIIRYKLYKELKDNGYKTLYSNQDIPKEKVFSKEIDIEHIIPQARLFDDSLSNKTLEYKAINIEKGNKTAYDFVKEKYGEKGLQQYLNRCESLFKGHRTKLRKLKMGQENIPEGFIDRDLRNTQYIAKKALAMLNEICRRVVATTGSITDRLREDWQLVDVLKELRCFRYFKDTKMKANHNKNIFYTSIKVDVSDTSKILK

SEQ ID NO: 795 - protein, 1049 aa, Tistrella mobilis
MINERLTFGIDLGIGSCGWAVLRHADAAGEPGVIEGLGSWCFDVPETSKERIPTNQVRRSNRLLRRVIRRRRNRMAEIRRLFHAQGLLPSADEDALKRPRLDPWELRARGLDQCLSAEEFAVALGHIARHRGFRSSAKRKAANTSGEDSKMLSALLVTRERTARYRTVGEMFARDPEYSARRRNRDGIFDRTVARDDLIHEVGKLFEAQRARGSAFASPDLEADFNAIAFRQAEMQDSERLVGNCPFERDEKRAARWAPSFERFRLLTRLINLRIATAEGERRFTPEDLARVSAELGATAKLPVSRVRALIGLLPDERFTTIRVEDEDRDIVARTGEAAPGTWRLRKTLGEALWAEMQARPDQLDAIAHVLSFFEATAKIRSELDRLGLPAAVIEALDRGLEDGAFAKFKGAGHISAKACRNLLPHLQQGHRYDQACRLAGYDHAASTLSHTAQVVSKAGFNALVTELGESIANPIARKALTEGLKQIRAMCARWGLPGAIHIELAREVGNSIEKRRELESQRETTTKRRQTERDEIRGLLALEDVDDDTLLRYRLWKEQGGKCLYTGKDIHVRQLIATDNSVQVDHILPWSRFGDDSFNNKTLCLASANQRKRGQTPWEWFSLTGTPEAWEVFASRVETSKDLRGFKKRNLLLKNADEVAQRFRSRNLNDTRYAARLLAEAAKLFYPAGDRQEKDGRRRVLTRPGPLTAALRHAWGLESLKKADGKRVSDDRHHALDALAVAAISEREVQRLTRSFQEWEQQGLARPLRHVAPPWPGFRGDVLAAYAQAFVARPERRRARGKGHDASIRQVVGEGPEAQVFERRGLADLKEADLDRVKDPERNQAIIEAVRAWILAGRPADAPPRSPRGDVIVKLRTAPAKKIKPAVPVRGGTADRGDMVRIDVFTRPNRKGRDEWYLVPIYPHQVMNRKAWPHPPMRSVVAYKDEAGWTEIGAEHSFRFSLYPRSYVQLVKSNGDVIEGYLVSMDRSTGAFRVFVHNNPAEMAKGIGAKTLLNLRKFNVDRFGVRTEVKSEVRTWHGEVCTSPVPPD

SEQ ID NO: 796 - protein, 1395 aa, Treponema denticola
MKKEIKDYFLGLDVGTGSVGWAVTDTDYKLLKANRKDLWGMRCFETAETAEVRRLHRGARRRIERRKKRIKLLQELFSQEIAKIDEGFFQRMKESPFYAEDKTILQENALFNDKDFTDKTYHKAYPTINHLIKAWIENKVKPDPRLLYLACHNIIKKRGHFLFEGDFDSENQFDTSIQALFEYLREDMEVDIDADSQKVKEILKDSSLKNSEKQSRLNKILGLKPSDKQKKAITNLISGNKINFADLYDNPDLKDAEKNSISFSKDDFDALSDDLASILGDSFELLLKAKAVYNCSVLSKVIGDEQYLSFAKVKIYEKHKTDLTKLKAVIKKHFPNNYKKVFGYNQDNESKNNYSGYVGVCKTKNKKLVINNSVNQEDFYKFLKPILSAKSEIKEVNDILAEIETGNFLPKQISKSNAEIPYQLRKMELEKILSNAEKHFSFLKQKDEKGLSHSEKIIMLLTFKIPYYIGPINDNHKKSFPDRCWVVKKEKSPSGKTTPWNFFDHIDKEKTAEEFITSRTNFCTYLIGESVLPKNSLLYSEYTVLNEINNLQIIIDGKNICDTKLKQKIYEDLFKKYKKITQKQISTFIKHEGICNKTDEVIILGIDKECTSSLKSYIELKNIFGKQVDEISTKNMLEEIIRWATIYDEGEGKTILKTKIKAEYGKYCSDEQIKKILNLKFSGWGRLSRKFLETVTSEMPGFSEPVNIITAMRETQNNLMELLSSEFKFTENIKKINSGFEDAEKQFSYDGLVKPLFLSPSVKKMLWQTLKLVKEISHITQAPPKKIFIEMAKGAELEPARTKTRLKILQDLYSSCKNDADAFSSEIQYLSGKIENEDNLRLRSDKLYLYYTQLGKCMYCGKPIEIGHVFDTSNYDIDHIYPQSKIKDDSISNRVLVCSSCNKNKEDKYPLKSEIQSKQRGFWNFLQRNNFISLEKLNRLTRTTPISDDETAKFIARQLVETRQATKVAAKVLEKMFPETKIVYSKAETVSMFRNKFDIIKCREINDFHHAHDAYLNIVVGNVYNTKFTNNPWNFIKEKRDNPKIADTYNYYKVFDYDVKRNNITAWEKGKTIITVKDMLKRNTPIYTRQAACKKGGLFDQTIMKKGLGQHPLKKEGPFSNISKYGGYNKVSAAYYTLIEYEEKGNKIRSLETIPLYLVKDIQKDQDVLKSYLTDLLGKKEFKILVPKIKINSLLKINGFPCHITGKTNDSFLLRPAVQFCCSNDEVLYFKKIIRFSEIRSQREKIGKTISPYEDLSFRSYIKENLCKKTKNDEIGEKEFYDLLQKKNLEIYDMLLTKHKDTIYKKRPNSATIDILVKGKEKFKSLIIENQFEVILEILKLFSATRNVSELQHIGGSKYSGVAKIGNKISSLDNCILIYQSITGIFEKRIDLLKV

SEQ ID NO: 797 - protein, 769 aa, Treponema denticola
MKKEIKDYFLGLDVGTGSVGWAVTDTDYKLLKANRKDLWGMRCFETAETAEVRRLHRGARRRIERRKKRIKLLQELFSQEIAKIDEGFFQRMKESPFYAEDKTILQENALFNDKDFTDKTYHKAYPTINHLIKAWIENKVKPDPRLLYLACHNIIKKRGHFLFEGDFDSENQFDTSIQALFEYLREDMEVDIDADSQKVKEILKDSSLKNSEKQSRLNKILGLKPSDKQKKAITNLISGNKINFADLYDNPDLKDAEKNSISFSKDDFDALSDDLASILGDSFELLLKAKAVYNCSVLSKVIGDEQYLSFAKVKIYEKHKTDLTKLKAVIKKHFPNNYKKVFGYNQDNESKNNYSGYVGVCKTKNKKLVINNSVNQEDFYKFLKPILSAKSEIKEVNDILAEIETGNFLPKQISKSNAEIPYQLRKMELEKILSNAEKHFSFLKQKDEKGLSHSEKIIMLLTFKIPYYIGPINDNHKKSFPDRCWVVKKEKSPSGKTTPWNFFDHIDKEKTAEEFITSRTNFCTYLIGESVLPKNSLLYSEYTVLNEINNLQIIIDGKNICDTKLKQKIYEDLFKKYKKITQKQISTFIKHEGICNKTDEVIILGIDKECTSSLKSYIELKNIFGKQVDEISTKNMLEEIIRWATIYDEGEGKTILKTKIKAEYGKYCSDEQIKKILNLKFSGWGRLSRKFLETVTSEMPGFSEPVNIITAMRETQNNLMELLSSEFKFTENIKKINSGFEDAEKQFSYDGLVKPLFLSPSVKKCCGRL

SEQ ID NO: 798 - protein, 1395 aa, Treponema denticola
MKKEIKDYFLGLDVGTGSVGWAVTDTDYKLLKANRKDLWGMRCFETAETAEVRRLHRGARRRIERRKKRIKLLQELFSQEIAKIDEGFFQRMKESPFYAEDKTILQENALFNDKDFTDKTYHKAYPTINHLIKAWIENKVKPDPRLLYLACHNIIKKRGHFLFEGDFDSENQFDTSIQALFEYLREDMEVDIDADSQKVKEILKDSSLKNSEKQSRLNKILGLKPSDKQKKAITNLISGNKINFADLYDNPDLKDAEKNSISFSKDDFDALSDDLASILGDSFELLLKAKAVYNCSVLSKVIGDEQYLSFAKVKIYEKHKTDLTKLKAVIKKHFPNNYKKVFGYNQDNESKNNYSGYVGVCKTKNKKLVINNSVNQEDFYKFLKPILSAKSEIKEVNDILAEIETGNFLPKQISKSNAEIPYQLRKMELEKILSNAEKHFSFLKQKDEKGLSHSEKIIMLLTFKIPYYIGPINDNHKKSFPDRCWVVKKEKSPSGKTTPWNFFDHIDKEKTAEEFITSRTNFCTYLIGESVLPKNSLLYSEYTVLNEINNLQIIIDGKNICDTKLKQKIYEDLFKKYKKITQKQISTFIKHEGICNKTDEVIILGIDKECTSSLKSYIELKNIFGKQVDEISTKNMLEEIIRWATIYDEGEGKTILKTKIKAEYGKYCSDEQIKKILNLKFSGWGRLSRKFLETVTSEMPGFSEPVNIITAMRETQNNLMELLSSEFKFTENIKKINSGFEDAEKQFSYDGLVKPLFLSPSVKKMLWQTLKLVKEISHITQAPPKKIFIEMAKGAELEPARTKTRLKILQDLYSSCKNDADAFSSEIQYLSGKIENEDNLRLRSDKLYLYYTQLGKCMYCGKPIEIGHVFDTSNYDIDHIYPQSKIKDDSISNRVLVCSSCNKNKEDKYPLKSEIQSKQRGFWNFLQRNNFISLEKLNRLTRTTPISDDETAKFIARQLVETRQATKVAAKVLEKMFPETKIVYSKAETVSMFRNKFDIIKCREINDFHHAHDAYLNIVVGNVYNTKFTNNPWNFIKEKRDNPKIADTYNYYKVFDYDVKRNNITAWEKGKTIITVKDMLKRNTPIYTRQAACKKGELFNQTIMKKGLGQHPLKKEGPFSNISKYGGYNKVSAAYYTLIEYEEKVNKIRSLETIPLYLVKDIQKDQDVLKSYLTDLLGKKEIKILVPKIKINSLLKINGFPCHITGKTGDSFVLRPAVQFCCSNDEVLYFKKIIRFNEIRSQREKMGKTISPYEDLSFRSYIKENLCKKTKADEIGEKEFYDLLQKKNLEIYDMLLTKHKDTIYNKRPNSTTLGMLTKGRYEFINLKPKDQIIVMLEILKLFCTTREAIDLGLIKGKPAAGVATLGKKISNLDNCILIYQSITGIFEKRIDLLKV

SEQ ID NO: 799 - protein, 1395 aa, Treponema denticola
MKKEIKDYFLGLDVGTGSVGWAVTDTDYKLLKANRKDLWGMRCFETAETAEVRRLHRGARRRIERRKKRIKLLQELFSQEIAKIDEGFFQRMKESPFYAEDKTILQENTLFNDKDFTDKTYHKAYPTINHLIKAWIENKVKPDPRLLYLACHNIIKKRGHFLFEGDFDSENQFDTSIQALFEYLREDMEVDIDADSQKVKEILKDSSLKNSEKQSRLNKILGLKPSDKQKKAITNLISGNKINFADLYDNPDLKDAEKNSISFSKDDFDALSDDLASILGDSFELLLKAKAVYNCSVLSKVIGDEQYLSFAKVKIYEKHKTDLTKLKNVIKKHFPKDYKKVFGYNKNEKNNNNYSGYVGVCKTKSKKLIINNSVNQEDFYKFLKTILSAKSEIKEVNDILTEIETGTFLPKQISKSNAEIPYQLRKMELEKILSNAEKHFSFLKQKDEKGLSHSEKIIMLLTFKIPYYIGPINDNHKKSFPDRCWVIKKEKSPSGKTTPWNFFDHIDKDKTAEAFITSRTNFCTYLVGESVLPKSSLLYSEYTVLNEINNLQIIIDGKNICDIKLKQKIYEELFKKYKKITQKQISTFIKHEGICNKTDEVIILGIDKECTSSLKSYIELKNIFGKQVDEISTKNMLEEIIRWATIYDEGEGKTILKTKIKAEYGKYCSDEQIKKILNLKFSGWGRLSRKFLETVTSEMPGFSEPVNIITAMRETQNNLMELLSSEFKFTENIKKINSGFEDAEKQFSYNGLVKPLFLSPSVKKMLWQTLKLVKEISHITQAPPKKIFIEMAKGAELEPARTKTRLKILQDLYNNCKNDADAFSSEIKDLSGKIENEDNLRLRSDKLYLYYTQLGKCMYCGKPIEIGHVFDTSNYDIDHIYPQSKIKDDSISNRVLVCSSCNKNKEDKYPLKSEIQSKQRGFWNFLQRNNFISLEKLNRLTRTTPISDDETAKFIARQLVETRQATKVAAKVLEKMFPETKIVYSKAETVSMFRNKFDIIKCREINDFHHAHDAYLNIVVGNVYNTKFTNNPWNFIKEKRDNPKIADTYNYYKVFDYDVKRNNITAWEKGKTIITVKDMLKRNTPIYTRQAACKKGGLFDQTIMKKGLGQHPLKKEGAFSNISKYGGYNKVSAAYYTLIEYEEKGNKIRSLETIPLYLVKDIQKDQDVLKSYLTDLLGKKEIKILVPKIKINSLLKINGFPCHITGKTGDSFVLRPAVQFCCSNDEVLYFKKIIRFNEIRSQREKMGKTISPYEDLSFRSYIKENLCKKTKADEIGEKEFYDLLQKKNLEIYDMLLTKHKDTIYNKRPNSTTLGMLTKGRYEFINLKPKDQIIVMLEILKLFCTTREAIDLGLIKGKPAAGVATLGKKISNPDNCILIYQSITGIFEKRIDLLKV

SEQ ID NO: 800 - protein, 1395 aa, Treponema denticola
MKKEIKDYFLGLDVGTGSVGWAVTDTDYKLLKANRKDLWGMRCFETAETAEVRRLHRGARRRIERRKKRIKLLQELFSQEIAKIDEGFFQRMKESPLYAEDKTILQENTLFNDKDFTDKTYHKAYPTINHLIKAWIENKVKPDPRLLYLACHNIIKKRGHFLFEGDFDSENQFDTSIQALFEYLREDMELDIDADSQKVKEILKDSSLKNSEKQSRLNKMLGLKPSDKQKKAITNLISGNKINFADLYDNPDLKDAEKNSISFSKDDFDALSDDLASILGDSFELLLKAKAVYNCSVLSKVIGDEQYLSFAKVKIYEKHKTDLTKLKNVIKKHFPKDYKKVFGYNKNEKNNNNYSAYVGVCKITHKKLVIKNSASQEDFYKFLKTILSAKSEIKEVNDILTEIETGTFLPKQISKSNAEIPYQLRKMELEKILSNAEKHFSFLKQKDEKGLSHSEKIIMLLTFKIPYYIGPINDNHKKSFPDRCWVVKKEKSPSGKTTPWNFFDHIDKEKTAEEFITSRTNFCTYLIGESVLPKSSLLYSEYTVLNEINNLQIIIDGKNICDIKLKQKIYEELFKKYKKITQKQISTFIKHEGICNKTDEVIILGIDKECTSSLKSYIELKNIFGKQVDEISTKNMLEEIIRWATIYDEGEGKTILKTKIKAEYGKYCSDEQIKKILNLKFSGWGRLSRKFLETVTSEMPGFSEPVNIITAMRETQNNLMELLSSEFKFTENIKKINSGFEDAEKQFSYNGLVKPLFLSPSVKKMLWQTLKLVKEISHITQAPPKKIFIEMAKGAELEPARTKTRLKILQDLYSSCKNDADAFSSEIQYLSGKIENEDNLRLRSDKLYLYYTQLGKCMYCGKPIEIGHVFDTSNYDIDHIYPQSKIKDDSISNRVLVCSSCNKNKEDKYPLKAEIQSKQRGFWNFLQRNNFISLEKLNRLTRTSPISDDETAKFIARQLVETRQATKVAAKVLEKMFPETKIVYSKAETVSMFRNKFDIIKCREINDFHHAHDAYLNIVVGNVYNTKFTNNPWNFIKEKRDNPKIADTYNYYKVFDYDVKRNNITAWEKGKTIITVKDMLKRNTPIYTRQAACKKGELFNQTIMKKGLGQHPLKKEGPLSNISKYGGYNKVSAAYYTLIEYEEKGSKIRSLETIPLYLVKDIQKNKDGLKSYLTDQIGKKEIKILIPKIKINSLLKINGFPCHITGKMGEAFVLRPAVQFCCSNDEALYFKKIIRFNEIRKQREKMGKTISPYEDLSFRSYIKDNLCKKTKADEIEEKEFYDLLQKKNLEIYDMLLTKHKDTIYKKRPNSATIDILVKGKEKFKSLIIENQFEVILEILKLFSATRNVSDLQHIGGSKNAGNARVGNKISSLDNCILIYQSITGIFEKRIDLLKI

SEQ ID NO: 801 - protein, 1395 aa, Treponema denticola
MKKEIKDYFLGLDVGTGSVGWAVTDTDYKLLKANRKDLWGMRCFETAETAEVRRLHRGARRRIERRKKRIKLLQELFSQEIAKIDEGFFQRMKESPLYAEDKTILQENTLFNDKDFTDKTYHKAYPTINHLIKAWIENKVKPDPRLLYLACHNIIKKRGHFLFEGDFDSENQFDTSIQALFEYLREDMEVDIDADSQKVKEILKDSSLKNSEKQSRLNKMLGLKPSDKQKKAITNLISGNKINFADLYDNPDLKDAEKNSISFSKDDFDALSDDLASILGDSFELLLKAKAVYNCSVLSKVIGDEQYLSFAKVKIYEKHKTDLTKLKNVIKKHFPKDYKKVFGYNKNEKNNNNYSGYVGVCKTKSKKLIINNSVNQEDFYKFLKTILSAKSEIKEVNDILTEIETGTFLPKQISKSNAEIPYQLRKMELEKILSNAEKHFSFLKQKDEKGLSHSEKIIMLLTFKIPYYIGPINDNHKKSFPDRCWVVKKEKSPSGKTTPWNFFDHIDKEKTAEEFITSRTNFCTYLIGESVLPKNSLLYSEYTVLNEINNLQIIIDGKNICDTKLKQKIYEELFKKYKKITQKQISTFIKHEGICNKTDEVIILGIDKECTSSLKSYIELKNIFGKQVDEISTKNMLEEIIRWATIYDEGEGKTILKTKIKAEYGKYCSDEQIKKILNLKFSGWGRLSRKFLETVTSEMPGFSEPVNIITAMRETQNNLMELLSSEFKFTENIKKINSGFEDVEKQFSYDGLVKPLFLSPSVKKMLWQTLKLVKEISHITQAPPKKIFIEMAKGAELDPVRTKTRLKILQDLYNNCKNDADAFSSEIKDLSGKIENEDNLRLRSDKLYLYYTQLGKCMYCGKPIEIGHVFDTSNYDIDHIYPQSKIKDDSISNRVLVCSSCNKNKEDKYPLKAEIQSKQRGFWNFLQRNNFISLEKFNRLTRATPISDDETAKFIARQLVETRQATKVAARVLEKMFPETKIVYSKAETVSMFRNKFDIVKCREINDFHHAHDAYLNIVVGNVYNTKFTNNLWNFIKEKRDNPKIADTYNYYKVFDYDVKRNNITAWEKGKTIITVKDMLKRNTPIYTRQAACKKGGLFDQTIMKKGLGQHPLKKEGPFSNISKYGGYNKVSAAYYTLIEYEEKGNKIRSLETIPLYLVKDIQKDQDVLKSYLTDLLGKKEFKILVPKIKINSLLKINGFPCHITGKTNDSFLLRPAVQFCCSNDEVLYFKKIIRFSEIRSQREKIGKTISPYEDLSFRSYIKENLCKKTKNDEIGEKEFYDLLQKKNLEIYDMLLTKHKDTIYKKRPNSATIDILVKGKEKFKSLIIENQFEVILEILKLFSATRNVSDLQHIGGSKYSGVAKIGNKISSLDNCILIYQSITGIFEKRIDLLKV

SEQ ID NO: 802 - protein, 357 aa, Treponema denticola
MKKEIKDYFLGLDVGTGSVGWAVTDTDYKLLKANRKDLWGMRCFETAETAEVRRLHRGARRRIERRKKRIKLLQELFSQEIAKTDEGFFQRMKESPFYAEDKTILQENALFNDRDFTDKTYHKAYPTINHLIKAWIENKVKPDPRLLYLACHNIIKKRGHFLFEGDFDSENQFDTSIQAFFEYLREDMEVDIDADSQKIKEILKDSSLKNSEKQSRLNKILGLKSSDKQKKAITNLISGNKINFADLYDNPDLKDAEKNSISFSKDDFDALSDDLASILGDSFELLLKAKAVYNCSVLSKVIGDEQYLSFAKVKIYEKHKTDLTKLKNVIKKHFPKDYKKVFGYNKNEKITTITPDM

SEQ ID NO: 803 - protein, 1395 aa, Treponema denticola
MKKEIKDYFLGLDVGTGSVGWAVTDTDYKLLKANRKDLWGMRCFETAETAEVRRLHRGARRRIERRKKRIKLLQELFSQEIAKTDEGFFQRMKESPFYAEDKTILQENALFNDRDFTDKTYHKAYPTINHLIKAWIENKVKPDPRLLYLACHNIIKKRGHFLFEGDFDSENQFDTSIQALFEYLREDMEVDIDADSQKVKEILKDSSLKNSEKQSRLNKMLGLKPSDKQKKAITNLISGNKINFADLYDNPDLKDAEKNSISFSKDDFDALSDDLASILGDSFELLLKAKAVYNCSVLSKVIGDEQYLSFAKVKIYEKHKTDLTKLKNVIKKHFPNDYKKVFGYNKNEKNNNNYSAYVGVCKTKSKKLVINNTVNQEDFYKFLKPILLAKSEIKEVNDILTEIETGTFLPKQISKSNAEIPYQLRKMELEKILSNAEKHFSFLKQKDEKGLSHSEKIIMLLTFKIPYYIGPINDNHKKSFPDRCWVIKKEKSPSGKTTPWNFFDHIDKDKTAEAFITSRTNFCTYLVGESVLPKNSLLYSEYTVLNEINNLQIIIDGKNICDIKLKQKIYEELFKKYKKITQKQISTFIKHEGICNKTDEVIILGIDKECTSSLKSYIELKNIFGKQVDEISTKNMLEEIIRWATIYDEGEGKTILKTKIKAEYGKYCSDEQIKKILNLKFSGWGRLSRKFLETVTSEMPGFSEPVNIITAMRETQNNLMELLSSEFKFTENIKKINSGFEDVEKQFSYDSLVKPLFLSPSVKKMLWQTLKLVKEISHITQAPPKKIFIEMAKGAELDPVRTKTRLKILQDLYNNCKNDADAFSSEIKDLSGKIENEDNLRLRSDKLYLYYTQLGKCMYCGKPIEIGHVFDTSNYDIDHIYPQSKIKDDSISNRVLVCSSCNKNKEDKYPLKAEIQSKQRGFWNFLQRNNFISLEKLNRLTRTSPISDDETAKFIARQLVETRQATKVAAKVLEKMFPETKIVYSKAETVSMFRNKFDIIKCREINDFHHAHDAYLNIVVGNVYNTKFTNNPWNFIKEKRDNPKIADTYNYYKVFDYDVKRNNITAWEKGKTIITVKDMLKRNTPIYTRQAACKKGELFNQTIMKKGLGQHPLKKEGPLSNISKYGGYNKVSAAYYTLIEYEEKGSKIRSLETIPLYLVKDIQKNKDGLKSYLTDQIGKKEIKILIPKIKINSLLKINGFPCHITGKMGEAFVLRPAVQFCCSNDEALYFKKIIRFNEIRKQREKMGKTISPYEDLSFRSYIKDNLCKKTKADEIEEKEFYDLLQKKNLEIYDMLLTKHKDTIYKKRPNSATIDILVKGKEKFKSLIIENQFEVILEILKLFSATRNVSDLQHIGGSKNAGNARVGNKISSLDNCILIYQSITGIFEKRIDLLKI

SEQ ID NO: 804 - protein, 631 aa, Treponema denticola
MLWQTLKLVKEISHITQAPPKKIFIEMAKGAELEPARTKTRLKILQDLYNNCKNDADAFSSEIKDLSGKIENEDNLRLRSDKLYLYYTQLGKCMYCGKPIEIGHVFDTSNYDIDHIYPQSKIKDDSISNRVLVCSSCNKNKEDKYPLRSEIQSKQRGFWNFLQRNNFISLEKLNRLTRTTPISDDETAKFIARQLVETRQATKVAAKVLEKMFPETKIVYSKAETVSMFRNKFDIVKCREINDFHHAHDAYLNIVVGNIYNTKFTNNPWNFIKEKRDNPKIADTYNYYKVFDYDVKRNNITAWEKGKTIITVKDMLKRNTPIYTRQAACKKGGLFDQTIMKKGLGQHPLKKEGPFSNISKYGGYNKVSAAYYTLIEYEEKENKIRSLETIPLYLVKDIQKSQEKLKSYLTDLLGKKEIKILVPKIKINSLLKINGFPCHITGKTNDSFLLRPAVQFCCSNDEVLYFKKIIRFNEIRSQREKMGKTISPYEDLSFRSYIKENLCKKTKNDEIGEKEFYDLLQKKNLEIYDMLLTKHKDTIYNKRPNSTTLGMLTKGRYEFINLKPKDQIIVMLEILKLFCTTREAIDLGLIKGKPAAGVATLGKKISNLDNCILIYQSITGIFEKRIDLLKV

SEQ ID NO: 805 - protein, 631 aa, Treponema denticola
MLWQTLKLVKEISHITQAPPKKIFIEMAKGAELEPARTKTRLKILQDLYSSCKNDADAFSSEIQYLSGKIENEDNLRLRSDKLYLYYTQLGKCMYCGKPIEIGHVFDTSNYDIDHIYPQSKIKDDSISNRVLVCSSCNKNKEDKYPLKSEIQSKQRGFWNFLQRNNFISLEKLNRLTRTTPISDDETAKFIARQLVETRQATKVAAKVLEKMFPETKIVYSKAETVSMFRNKFDIIKCREINDFHHAHDAYLNIVVGNVYNTKFTNNPWNFIKEKRDNPKIADTYNYYKVFDYDVKRNNITAWEKGKTIITVKDMLKRNTPIYTRQAACKKGELFNQTIMKKGLGQHPLKKEGPFSNISKYGGYNKVSAAYYTLIEYEEKVNKIRSLETIPLYLVKDIQKDQDVLKSYLTDLLGKKEIKILVPKIKINSLLKINGFPCHITGKTGDSFVLRPAVQFCCSNDEVLYFKKIIRFNEIRSQREKMGKTISPYEDLSFRSYIKENLCKKTKADEIGEKEFYDLLQKKNLEIYDMLLTKHKDTIYNKRPNSTTLGMLTKGRYEFINLKPKDQIIVMLEILKLFCTTREAIDLGLIKGKPAAGVATLGKKISNLDNCILIYQSITGIFEKRIDLLKV

SEQ ID NO: 806 - protein, 370 aa, Treponema denticola
MTEIETGTFLPKQISKSNAEIPYQLRKMELEKILSNAEKHFSFLKQKDEKGLSHSEKIIMLLTFKIPYYIGPINDNHKKSFPDRCWVVKKEKSPSGKTTPWNFFDHIDKEKTAEEFITSRTNFCTYLVGESVLPKSSLLYSEYTVLNEINNLQIIIDGKNICDIKLKQKIYEELFKKYKKITQKQISTFIKHEGICNKTDEVIILGIDKECTSSLKSYIELKNIFGKQVDEISTKNMLEDIIRWAAIYDEGEGKTILKTKIKAEYGKYCSDEQIKKILNLKFSGWGRLSRKFLETVTSEMPGFSEPVNIITAMRETQNNLMELLSSEFKFTENIKKINSGFEDVEKQFSYDGLVKPLFLSPSVKKCCGRL

SEQ ID NO: 807 - protein, 591 aa, Treponema phagedenis
MARGKEAEKGRTSSRYASIKALYENCKQDLADYDAVLEQFKSEEPLRLRSDKLYLYYTQLGRCMYTGRVIDIDRLMSDNSAYDIDHIYPRSKIKDDSLTNRVLVVKDANQDKRDEPLSPQIQDKQKGFWDFLKHNNFISIEKYERLTYRGYFTEEMLSGFIARQLVETRQGTKTAGQILEQLYPDSTVVYCKAANTSEFRQKFNLIKCREINDLHHAHDAYLNIAVGNVYYTKFTSNPRNFMKLKEPYNLRELFDRDVERNNTIAWVKNKTITTIKDMLKRNTPLYTRYAYCKTGGFFDQNIMKKGKGQFPLKENSPLSDISKYGGYNKVSGAYFILVQKKEKDAVVRILETVPLYLLNKPGKESENVREYLSTALGTKDFKILIPKIKINSLFKINGFLVHITGKTNDRFLVRSAVQFFCDDNLTLFFKRIIAFNGLRNLNKDKSMTAYDDNTMRVYVRGNLFKDKNQLFDKNKFNEIVKGKNISVYKDMVKRYETSIYKFRPNTAVIPILKSGEDKFINLPIEEQFKILQEILKLFGAINGTANLTLIGGRPSTGEMKISNNISNLKQCILIHQSPTGVFEQQIDLLKI

SEQ ID NO: 808 - protein, 1062 aa, Treponema sp.
MIMKLEKWRLGLDLGTNSIGWSVFSLDKDNSVQDLIDMGVRIFSDGRDPKTKEPLAVARRTARSQRKLIYRRKLRRKQVFKFLQEQGLFPKTKEECMTLKSLNPYELRIKALDEKLEPYELGRALFNLAVRRGFKSNRKDGSREEVSEKKSPDEIKTQADMQTHLEKAIKENGCRTITEFLYKNQGENGGIRFAPGRMTYYPTRKMYEEEFNLIRSKQEKYYPQVDWDDIYKAIFYQRPLKPQQRGYCIYENDKERTFKAMPCSQKLRILQDIGNLAYYEGGSKKRVELNDNQDKVLYELLNSKDKVTFDQMRKALCLADSNSFNLEENRDFLIGNPTAVKMRSKNRFGKLWDEIPLEEQDLIIETIITADEDDAVYEVIKKYDLTQEQRDFIVKNTILQSGTSMLCKEVSEKLVKRLEEIADLKYHEAVESLGYKFADQTVEKYDLLPYYGKVLPGSTMEIDLSAPETNPEKHYGKISNPTVHVALNQTRVVVNALIKEYGKPSQIAIELSRDLKNNVEKKAEIARKQNQRAKENIAINDTISALYHTAFPGKSFYPNRNDRMKYRLWSELGLGNKCIYCGKGISGAELFTKEIEIEHILPFSRTLLDAESNLTVAHSSCNAFKAERSPFEAFGTNPSGYSWQEIIQRANQLKNTSKKNKFSPNAMDSFEKDSSFIARQLSDNQYIAKAALRYLKCLVENPSDVWTTNGSMTKLLRDKWEMDSILCRKFTEKEVALLGLKPEQIGNYKKNRFDHRHHAIDAVVIGLTDRSMVQKLATKNSHKGNRIEIPEFPILRSDLIEKVKNIVVSFKPDHGAEGKLSKETLLGKIKLHGKETFVCRENIVSLSEKNLDDIVDEKIKSKVKDYVAKHKGQKIEAVLSDFSKENGIKKVRCVNRVQTPIEITSGKISRYLSPEDYFAAVIWEIPGEKKTFKAQYIRRNEVEKNSKGLNVVKPAVLENGKPHPAAKQVCLLHKDDYLEFSDKGKMYFCRIAGYAATNNKLDIRPVYAVSYCADWINSTNETMLTGYWKPTPTQNWVSVNVLFDKQKARLVTVSPIGRVFRK

SEQ ID NO: 809 - protein, 281 aa, Treponema vincentii
MKTLGLDIGTNSIGWGIVDETANKIEDCGVYIFPEGVKKEKGNESSKAAERTSFRLARRLKFRRKLRKCETLKVLIKNKMCPLTMEELEKWRKQKIYPVSQDFLNWYRTDELKNWEPYFLRKKCAEQKAGPYEIGRALYHLAQRRGFLSNRKESTKASDGKVSKSIDELSSLMDGRTLGQYFYELKQSGEKVRGKYTSRKEHYEKEFNKICEVQEISPELKDDLYRAIFFQRKLKSQKFLVGKCTFERNKPRAPISHFEFEEFRMLSFINSIKIAKKLRRR

SEQ ID NO: 810 - protein, 675 aa, uncultured bacterium
MTAENYSNVRFAFDIGTNSIGWAVFQLNDKQEATSILNAGARIFSDGRDPKTFEPLAVRRRNVRSASRMRDRYLRRRKRTLDKLIGYGLLPEDKAERDKILLETNDKPSGSTDKKTDPYSLRARALEEKLPLAYVARALFHIGQRRGFKSNRKADRKSNEKGKIAAGIEELSGLMHQSHAPTLGAYLAKRREEGHVVRLRASSEALTNKAYAFYPERAMLEDEFHKIWQAQAEYYPDVLTKEREEELFHVMFFQRPLKEQKVGLCTLVEGELRLPKSDPLFQQFRLYKEINELAIILPDLSQRKLTMEERDTLITLMRPAKTKTFAALRKALKIPAGGRFNKETENRKQLTGDEVYSVFSKPELFGGDWAKFSIEQQREIIDQLNNEENPDKLEEWLKNKFPKLSDEQRSEIINANLPDGYGRFGITATSKILEQLKKDVISEAEAAHRCGFDHSLANRNWKGLDELPRYQEVLERHIVPGTGDKNDIYDIYKGRLTNPTVHIGLNQVRRLTNRLIKAYGKPWQIVVELARDLPMSSEERKEHNKTLNDNIKAGFERTQKLERLGQKDNANNRLLLKLWEELGKDPDDRKSIYSGTRITEPMLFSGEVEIDHILPFSLTYDDSYANKILCLREENRIKRNRAPADVTEWKDRYDEIIGRSKNCQRTNKNVLGPMQ

SEQ ID NO: 811 - protein, 1017 aa, uncultured bacterium]
MRVDSLGRCLSDEEWARVIYHLCKHRGFHWISRAEAKQTEGDSKSEGGKVKQGLAGTAKLMDEKGYRSAAEMVLAEFPEAQRNKQGEYRKALSRELLAKELALLFARQRVFGNRHATDTLETAILGNSDKKSGLFWQQKPALAGADLLKMLGTCTFEKNEYRAPKASFTAERHVWLTRLNNLRIVTDGITRQLTEQERQLVLPLPYRQAGDLTYKQLGMALTKAGLLEAGCFKFIGLAYPTEAQKAEGKTKDPESATLVKIPAWQELRQTLNKASLNDEWEKLSGDALCGQPEIFDKIAWILSVYKDDDEVRTELAKLVLPNPEGLTEALLNIRFDKFHALSLKALRAIVPHMEKGLRYDEACVQAGYHHSQLHKIGEGEHKYLPPLYDGRDGDGRMIFAEDADIPRNPVVLRSLNQARKVVNAIIRRYGSPSAVHIEMARDLSRPFDERNKIKKDQDEYQARNQRDREQFIELFGHPPKGLEFEKWRLYREQNGQCAYSQKPLASSGDVAEIFLDGSTEIDHALPYSRSFDDSKNNKVLVLTRENRDKGNRTPYEYLGGAENSERWQRFFSFVESNKAYRLAKRTRLLRKDFGAKESEEFRERNLNDTRYVCRFFKNYVEQHLKLAEGSEAKRCVVVSGQLTNFLRTRWGLLKIRSDSDRHHALDAAVVAACSHSMVQRLSNYSRTRELEQVRDGFVNIETGEIVNPAMHQQLREHFPDPWPYFRHELEARLKIDSPALLREEMARLSSYTEEELAALKPLFVSRAPQRRNGGAAHKDTIYGQPEKLKKNGSVSQKVALASLALKDIDLLADPHRNAKLYGAIRERLEAHGGKGDKAFPATNPLRKPDKEGNPTGPIVRTVTKVIDKLSGIPVRGGIAKNDTMLRVDVFTKAGRFHLVPVYVHHRVTGLPNQAITRGKDENQWAIIDDTFEWRFSLYPNDLVQIRLKDETHLGYYASTDRSTSSISIWAHDRNQSVGKDGLIRSIGVTTAKDIEKFHVDTLGNVYPAPPEKRRGLA

SEQ ID NO: 812 - protein, 600 aa, uncultured bacterium]
VNAIIKKHGSLSAVHIEMARDLSRPLDERREVKKLQEEFKDRNDKARESFEADHGYRPKGIVFEKWMLYREQHGKCAYSMEGLDIDRVLNDANYAQIDHALPYSRSYDDSKNNKVLVLTRENQNKGNRTAYEYLTSFAGGEDGDRWRNYAAWVNSNKSYRMAKRNRLLRKNYGPDEASGFKDRNLNDTRYICKFFKNYVEEHLQLAPRADGNANKRCVVVNGQLTAFLRARWGLSKVRSESDRHHALDAAVVAACSHGMVKALADYARNKEVAYLREGFPDPETGEIINPEAHARGVHHFPEPWAHFRHELQVRLYSDDLQALREDLQRLGTYSEQDLLGVRTLFVSRAPQRRNDGAVHKETIYAQPEALRKQGGVVQKVPLTSLSLKDLDNLADPHRNAKLYTALRARLEAHGGKADKAFGPDQPFYKPDKNGNPTGPIVRTIKLVIDKLSGIPIRGGVAKNDTMLRVDVFTKAGKFHLVPVYVHHRVTGLPDRAIVAFKDEVEWTQVDDSFKFLFSIHPNDLIRIGLKAKEPMIGYFASCHRGTGAFNVWSHDRNTSVGKSGSVEGIGIKTALSLEKLNIDVLGNVYPARPEQRHGLA

SEQ ID NO: 813 - protein, 1011 aa, uncultured delta
MSSKAIDSLEQLDLFKPQEYTLGLDLGIKSIGWAILSGERIANAGVYLFETAEELNSTGNKLISKAAERGRKRRIRRMLDRKARRGRHIRYLLEREGLPTDELEEVVVHQSNRTLWDVRAEAVERKLTKQELAAVLFHLVRHRGYFPNTKKLPPDDESDSADEEQGKINRATSRLREELKASDCKTIGQFLAQNRDRQRNREGDYSNLMARKLVFEEALQILAFQRKQGHELSKDFEKTYLDVLMGQRSGRSPKLGNCSLIPSELRAPSSAPSTEWFKFLQNLGNLQISNAYREEWSIDAPRRAQIIDACSQRSTSSYWQIRRDFQIPDEYRFNLVNYERRDPDVDLQEYLQQQERKTLANFRNWKQLEKIIGTGHPIQTLDEAARLITLIKDDEKLSDQLADLLPEASDKAITQLCELDFTTAAKISLEAMYRILPHMNQGMGFFDACQQESLPEIGVPPAGDRVPPFDEMYNPVVNRVLSQSRKLINAVIDEYGMPAKIRVELARDLGKGRELRERIKLDQLDKSKQNDQRAEDFRAEFQQAPRGDQSLRYRLWKEQNCTCPYSGRMIPVNSVLSEDTQIDHILPISQSFDNSLSNKVLCFTEENAQKSNRTPFEYLDAADFQRLEAISGNWPEAKRNKLLHKSFGKVAEEWKSRALNDTRYLTSALADHLRHHLPDSKIQTVNGRITGYLRKQWGLEKDRDKHTHHAVDAIVVACTTPAIVQQVTLYHQDIRRYKKLGEKRPTPWPETFRQDVLDVEEEIFITRQPKKVSGGIQTKDTLRKHRSKPDRQRVALTKVKLADLERLVEKDASNRNLYEHLKQCLEESGDQPTKAFKAPFYMPSGPEAKQRPILSKVTLLREKPEPPKQLTELSGGRRYDSMAQGRLDIYRYKPGGKRKDEYRVVLQRMIDLMRGEENVHVFQKGVPYDQGPEIEQNYTFLFSLYFDDLVEFQRSADSEVIRGYYRTFNIANGQLKISTYLEGRQDFDFFGANRLAHFAKVQVNLLGKVIK

SEQ ID NO: 814 - protein, 1011 aa, uncultured delta proteobacterium HF0070_07E19; identical to SEQ ID NO: 813

SEQ ID NO: 815 - protein, 1120 aa, Veillonella sp.
MGFKANLVNLFTDEDIEVILPEEKEFKSINLHEGIYEDVRDAYEDAWGDRFAIVDQCKVLHDIIVISSIIKPGQSLSEAKIESYNQHKEDLVLLKSVLKEDRKLYDDMFVVDTDKGTNYVKYTKQGVNGNTSATQEEFYKYVRKVVSVLPETEHTRRIVQKLEEGTFLPLQRISKNGVVPYQLHKEELVRILDKATVNFPFLNKVENGLTVADKIISILEFKIPYYVGPLNPTHSIENGGFAWVVRKEAGQVLPWNFEQKVDVQASAVKFIENLTNKCTYLIDQDVLPKYSLLYAEFSLLNELNNIRVNDKPLPADVKQAFIRDHFISLQDSKTATKKVVAKYLVDNNYVSQPPIITGMDQQIATKLTSHRDMTRILGEHFDHAMAEDIIRYITIFGESKDMLRQVLKNYYGDRLTTEQIKKLGKLTYTGWGRLSKKFLSDIWGMKKNDDDAEAGTIIEHMREGQENLMQLLSSSYSFIDVVQEYVTNVLGEKEKTAFEMLEDLSLSPMVKRSVWQTLRILDEIVSIRKELPKKIFVEVARTNKADKKRTQSRKALLEELYKQIKDEDVHVLQQELESKEDSALNSKKLYLYFTQMGRCMYSGRRIDIHELFTDKYDIDHIYPRSLTKDDSWHNIVLVEKQLNAEKTDRFPILSAIQSKQKGFWKLLWDRGFISEKKYDRLVRTTDLTDEELNQFINRQMVSTNQSVKAVTTLLHQLYPETEVVFSKAENVSDFRHDYDFVKVRSINHHHHAKDAYLNIVVGNVYHEKFTKNFLSFAKQKGTRRTYNLTKIFEYEIKLTEESKKVIWDPNIHMDIVKKMMKSNDVRVTQRAVPQKGGLSDETIYKKGIAKRGVYLPLKSSDERVRDVEKYGGRTSITISEYIILNIRDTSDQDRIEIFSLPLYIAGKKDIHKAIEEAYLSTCKKPASVVDIQILYRGLYIGSKVNINGFTYYMGGKTGSNVSIDSAVDVVMDITSSVYIKLLEKVAIKKIENPKTFRIENIKTSYNHKEVTVSKEQNIALYQELLKKLDTPLFSKMKGNKLEEFRTVGFDTFIALSLEEQASVLLEVLNVLTNFKTKRDITKIGMTSSRSTLGINISNTEQFSVITTSITGLYEQEIKIK

SEQ ID NO: 816 - protein, 983 aa, Verminephrobacter aporrectodeae
MRRRRDRLLKRKARMHDQLMRHGFFPADAAGRKVLERLNPYQLRAKGLHQALTPGEFARALFHINQRRGFQSNRKTDRKDNESGALKQAISELRAQIHDSGCATVGEWFWKERMQQKPEGVHRQGVRARYRETPYTTDEGRQRIDKRYDLYVDRAMIEQEFDALWAVQAALQPGLFTDAACKELRYTLLFQRKLRPVKPGRCTLLPEEERAPLALPSTQRFRILQEVNHLRLLDEALREVPLTLAQRDALVAALESQGKLGFAPMRKLLKLPGTVKFNLEDEKRTELKGNATSAILARKDLFGPAWAGFDAALQDEIVWQLVSEEGEGRLIAWLQQHTGVDEARAEAIADTSLPEGYGSLSRKALERIVPALQREVCSYDKAVQAAGFAHHSDLGFDFEHSGDEVQQVGERIIASTGEVRPLFAFKQLPYYGKALQRHVAFGSGKPEDPEEKRHGKIANPTVHIGLNQVRTVVNALIRRYGRPSEVVVELARDLKQSREQQQETQRKQAENQRRNTRIRERIAETLGISPERVRSSDIQKWILWEELSFDVVDRRCPYSGEQISTTMLLSPKVEIEHILPFSQTLDDSLNNRTVALREANRIKRNRTPWDARADFEARGWSYEGILHRAERMPLRKRYRFAPDGYQRWLGEDKDFLARALNDTRYLSRVAANYLRLVCPKPQGVRVIPGRMTAMLRAKFGLNDVLGLDGEKNRNDHRHHAVDACVIGVTDQGLMQRFARASAQAREDGLTRLVQDMPLPWPSYRDHVERAVRHIWVSHKPDHGFEGAMMEETAYGIRKDGSIKPRRKADGSAGREVVNLIRITESRQPVRHGVDSQGQPLPYKGYVGGSNYCIEITANDQGKWEGAVISTFEAYRIVRASGWGRLRHCSHGQNGRPLMMRLMIGDAVRLALDGSEKTMRVVKISANGQVFLVAPNEANVDARNRDKADPFAYVSKKAGSFQSAKARQVSISPIGELRDPGFKG

SEQ ID NO: 817 - protein, 5 aa, Artificial Sequence
  Synthetic sequence
GSGGS

SEQ ID NO: 818 - protein, 6 aa, Artificial Sequence
  Synthetic sequence
GGSGGS

SEQ ID NO: 819 - protein, 4 aa, Artificial Sequence
  Synthetic sequence
GGGS

SEQ ID NO: 820 - protein, 4 aa, Artificial Sequence
  Synthetic sequence
GGSG

SEQ ID NO: 821 - protein, 5 aa, Artificial Sequence
  Synthetic sequence
GGSGG

SEQ ID NO: 822 - protein, 5 aa, Artificial Sequence
  Synthetic sequence
GSGSG

SEQ ID NO: 823 - protein, 5 aa, Artificial Sequence
  Synthetic sequence
GSGGG

SEQ ID NO: 824 - protein, 5 aa, Artificial Sequence
  Synthetic sequence
GGGSG

SEQ ID NO: 825 - protein, 5 aa, Artificial Sequence
  Synthetic sequence
GSSSG

SEQ ID NO: 826 - protein, 16 aa, Artificial Sequence
  Synthetic sequence
RQIKIWFQNRRMKWKK

SEQ ID NO: 827 - RNA, 86 nt, Artificial Sequence
  Synthetic sequence
ggaaccauucaaaacagcauagcaaguuaaaauaaggcuaguccguuaucaacuugaaaaaguggcaccgagucggugcuuuuuuu

SEQ ID NO: 828 - RNA, 67 nt, Artificial Sequence
  Synthetic sequence
uagcaaguuaaaauaaggcuaguccguuaucaacuugaaaaaguggcaccgagucggugcuuuuuuu

SEQ ID NO: 829 - RNA, 88 nt, Streptococcus pyogenes
guuggaaccauucaaaacagcauagcaaguuaaaauaaggcuaguccguuaucaacuugaaaaaguggcaccgagucggugcuuuuuu

SEQ ID NO: 830 - RNA, 93 nt, Listeria innocua
auauuguuaguauucaaaauaacauagcaaguuaaaauaaggcuuuguccguuaucaacuuuuaauuaaguagcgcuguuucggcgcuuuuuu

SEQ ID NO: 831 - RNA, 104 nt, Streptococcus mutans
uguuggaaucauucgaaacaacacagcaaguuaaaauaaggcagugauuuuuaauccaguccguacacaacuugaaaaagugcgcaccgauucggugcuuuuuu

SEQ ID NO: 832 - RNA, 95 nt, Streptococcus thermophilus
uugugguuugaaaccauucgaaacaacacagcgaguuaaaauaaggcuuaguccguacucaacuugaaaagguggcaccgauucgguguuuuuuu

SEQ ID NO: 833 - RNA, 118 nt, Streptococcus thermophilus
uaauaauaguguaagggacgccuuacacaguuacuuaaaucuugcagaagcuacaaagauaaggcuucaugccgaaaucaacacccugucauuuuauggcaggguguuuucguuauuu

SEQ ID NO: 834 - RNA, 112 nt, Neisseria meningitidis
cauauugucgcacugcgaaaugagaaccguugcuacaauaaggccgucugaaaagaugugccgcaacgcucugccccuuaaagcuucugcuuuaaggggcaucguuuauuuc

SEQ ID NO: 835 - RNA, 110 nt, Pasteurella multocida
gcauauuguugcacugcgaaaugagagacguugcuacaauaaggcuucugaaaagaaugaccguaacgcucugccccuugugauucuuaauugcaaggggcaucguuuuu

SEQ ID NO: 836 - RNA, 115 nt, Mycoplasma mobile
uauuauguauuucgaaauacagauguacaguuaagaauacauaagaaugauacaucacuaaaaaaaggcuuuaugccguaacuacuacuuauuuucaaaauaaguaguuuuuuuu

SEQ ID NO: 837 - RNA, 26 nt, Artificial Sequence
  Synthetic sequence
uagcaaguuaaaauaaggcuaguccg

SEQ ID NO: 838 - RNA, 36 nt, Streptococcus pyogenes
uuguuggaaccauucaaaacagcauagcaaguuaaa

SEQ ID NO: 839 - RNA, 36 nt, Streptococcus mutans
guguuggaaucauucgaaacaacacagcaaguuaaa

SEQ ID NO: 840 - RNA, 36 nt, Streptococcus thermophilus
gguuugaaaccauucgaaacaacacagcgaguuaaa

SEQ ID NO: 841 - RNA, 36 nt, Streptococcus thermophilus
cuuacacaguuacuuaaaucuugcagaagcuacaaa

SEQ ID NO: 842 - RNA, 36 nt, Listeria innocua
auauuguuaguauucaaaauaacauagcaaguuaaa

SEQ ID NO: 843 - RNA, 34 nt, Listeria innocua
auuguuaguauucaaaauaacauagcaaguuaaa

SEQ ID NO: 844 - RNA, 36 nt, Treponema denticola
auuuaagauccaucuuaaauuacacaacgaguucaa

SEQ ID NO: 845 - RNA, 36 nt, Neisseria meningitidis
auugucgcacugcgaaaugagaaccguugcuacaau

SEQ ID NO: 846 - RNA, 38 nt, Neisseria meningitidis
auauugucgcacugcgaaaugagaaccguugcuacaau

SEQ ID NO: 847 - RNA, 36 nt, Streptococcus gordonii; identical to SEQ ID NO: 841

SEQ ID NO: 848 - RNA, 36 nt, Bifidobacterium bifidum
augaucaaggucauugaccugacaggcauaaauuga

SEQ ID NO: 849 - RNA, 36 nt, Lactobacillus salivarius
gguuuugaccucauugauuuaacauucugaguugaa

SEQ ID NO: 850 - RNA, 37 nt, Francisella tularensis
guuucaguuguuagauuauuugguauguacuuguguu

SEQ ID NO: 851 - RNA, 37 nt, Francisella tularensis
auuacagagcauuaauuauuugguacauuuauaauuu

SEQ ID NO: 852 - RNA, 37 nt, Legionella pneumophila
auuucaggguaucgaaauuuagaugauuucuaauuua

SEQ ID NO: 853 - RNA, 36 nt, Nitratifractor salsuginis
uguaacaggguaggguuuuuugaggggucuuaaaau

SEQ ID NO: 854 - RNA, 36 nt, Butyrivibrio fibrisolvens
aguuucuaaucacuuaauuuuuucggaccuacuaaa

SEQ ID NO: 855 - RNA, 36 nt, Streptobacillus moniliformis
gauucacauuauucaaguuuacuacagauucuguau

SEQ ID NO: 856 - RNA, 36 nt, Mycoplasma mobile
aguuaagaauacauaagaaugauacaucacuaaaaa

SEQ ID NO: 857 - RNA, 44 nt, Capnocytophaga ochracea
auugugaauugcuuucaaauugugcgacaaaaguagguauaaua

SEQ ID NO: 858 - RNA, 36 nt, Acidovorax ebreus
auugcagcaacggcucucaccccggauaaccacaau

SEQ ID NO: 859 - RNA, 36 nt, Wolinella succinogenes
auagccgcugccuacucagccauuuagcgcagcgac

SEQ ID NO: 860 - RNA, 37 nt, Wolinella succinogenes
uuuguuaaagcuggaugggauuauuauagaguguugc

SEQ ID NO: 861 - RNA, 37 nt, Wolinella succinogenes
uuucaaggcaucgaacggauuugcuauaaaguguugc

SEQ ID NO: 862 - RNA, 36 nt, Prevotella ruminicola
uuuugcacacguaagauuccuacaucuuaucacaau

SEQ ID NO: 863 - RNA, 48 nt, Fibrobacter succinogenes
auugugaauugcuuucagauuaugaaaauaauauaguuaaaauuuuug

SEQ ID NO: 864 - RNA, 36 nt, Campylobacter jejuni
auuuuauuucgauuuuaaucaacccuaaauuucaau

SEQ ID NO: 865 - RNA, 36 nt, Campylobacter jejuni
auuuuagucccuuuuuaaauuucuuaugagauuaua

SEQ ID NO: 866 - RNA, 25 nt, Campylobacter jejuni
aagaaauuuaaaaagggacuaaaau

SEQ ID NO: 867 - RNA, 36 nt, Pasteurella multocida
auuguagcaacgucucucauuucgcagugcaacaau

SEQ ID NO: 868 - RNA, 36 nt, Rhodopseudomonas palustris
gccguggcuuuccuaccgauuucccaccgcaugauu

SEQ ID NO: 869 - RNA, 36 nt, Olsenella uli
ucugaauuaccagucagaacgauacugcgagucaaa

SEQ ID NO: 870 - RNA, 36 nt, Rhodospirillum rubrum
guuccauggccccgucccacacgccaugauagagcg

SEQ ID NO: 871 - RNA, 36 nt, Rhodospirillum rubrum
aaacgggagaaccgucccacacggccaugguagagu

SEQ ID NO: 872 - RNA, 36 nt, Dinoroseobacter shibae
uuaacggcucgaccgcgaauucugaacguaaagaca

SEQ ID NO: 873 - RNA, 36 nt, Verminephrobacter eiseniae
uuagcguccagagcgcauaucccagugagauauccg

SEQ ID NO: 874 - RNA, 75 nt, Streptococcus pyogenes
aaacagcauagcaaguuaaaauaaggcuaguccguuaucaacuugaaaaaguggcaccgagucggugcuuuuuuu

SEQ ID NO: 875 - RNA, 77 nt, Listeria innocua
aaauaacauagcaaguuaaaauaaggcuuuguccguuaucaacuuuuaauuaaguagcgcuguuucggcgcuuuuuu

SEQ ID NO: 876 - RNA, 73 nt, Artificial Sequence
  Synthetic sequence
aacagcauagcaaguuaaaauaaggcuaguccguuaucaacuugaaaaaguggcaccgagucggugcuuuuuu

SEQ ID NO: 877 - RNA, 33 nt, Francisella novicida
uauaaauguaccaaauaauuaaugcucuguaau

SEQ ID NO: 878 - RNA, 74 nt, Campylobacter jejuni
aagaaauuuaaaaagggacuaaaauaaagaguuugcgggacucugcgggguuacaauccccuaaaaccgcuuuu

SEQ ID NO: 879 - RNA, 96 nt, Francisella novicida
aucuaaaauuauaaauguaccaaauaauuaaugcucuguaaucauuuaaaaguauuuugaacggaccucuguuugacacgucugaauaacuaaaaa

SEQ ID NO: 880 - RNA, 109 nt, Streptococcus thermophilus2
uguaagggacgccuuacacaguuacuuaaaucuugcagaagcuacaaagauaaggcuucaugccgaaaucaacacccugucauuuuauggcaggguguuuucguuauuu

SEQ ID NO: 881 - RNA, 110 nt, Mycoplasma mobile
uguauuucgaaauacagauguacaguuaagaauacauaagaaugauacaucacuaaaaaaaggcuuuaugccguaacuacuacuuauuuucaaaauaaguaguuuuuuuu

SEQ ID NO: 882 - RNA, 92 nt, Listeria innocua
auuguuaguauucaaaauaacauagcaaguuaaaauaaggcuuuguccguuaucaacuuuuaauuaaguagcgcuguuucggcgcuuuuuuu

SEQ ID NO: 883 - RNA, 89 nt, Streptococcus pyogenes
guuggaaccauucaaaacagcauagcaaguuaaaauaaggcuaguccguuaucaacuugaaaaaguggcaccgagucggugcuuuuuuu

SEQ ID NO: 884 - RNA, 107 nt, Streptococcus mutans
guuggaaucauucgaaacaacacagcaaguuaaaauaaggcagugauuuuuaauccaguccguacacaacuugaaaaagugcgcaccgauucggugcuuuuuuauuu

SEQ ID NO: 885 - RNA, 96 nt, Streptococcus thermophilus
uugugguuugaaaccauucgaaacaacacagcgaguuaaaauaaggcuuaguccguacucaacuugaaaagguggcaccgauucgguguuuuuuuu

SEQ ID NO: 886 - RNA, 102 nt, Neisseria meningitidis
acauauugucgcacugcgaaaugagaaccguugcuacaauaaggccgucugaaaagaugugccgcaacgcucugccccuuaaagcuucugcuuuaaggggca

SEQ ID NO: 887 - RNA, 110 nt, Pasteurella multocida; identical to SEQ ID NO: 835

SEQ ID NO: 888 - RNA, 37 nt, Francisella novicida
aacacaaguacauaccaaauaaucuaacaacugaaac

SEQ ID NO: 889 - RNA, 37 nt, Francisella novicida
aaauuauaaauguaccaaauaauuaaugcucuguaau

SEQ ID NO: 890 - RNA, 37 nt, Wolinella succinogenes; identical to SEQ ID NO: 861

SEQ ID NO: 891 - RNA, 37 nt, Wolinella succinogenes; identical to SEQ ID NO: 860

SEQ ID NO: 892 - RNA, 37 nt, gamma proteobacterium
auuucaguguauagaauguugggaugcauucugaaua

SEQ ID NO: 893 - RNA, 37 nt, gamma proteobacterium
auaacaagggaguauuugcuggaauaagcucugaaac

SEQ ID NO: 894 - RNA, 37 nt, Sutterella wadsworthensis
guuuccaagcaauagcucguggcguuaugauuucugu

SEQ ID NO: 895 - RNA, 37 nt, Sutterella wadsworthensis
ggugauuuccuauagcucauagcguuaugaucucuaa

SEQ ID NO: 896 - RNA, 37 nt, Legionella pneumophila; identical to SEQ ID NO: 852

SEQ ID NO: 897 - RNA, 36 nt, Listeria innocua; identical to SEQ ID NO: 842

SEQ ID NO: 898 - RNA, 36 nt, Streptococcus thermophilus; identical to SEQ ID NO: 840

SEQ ID NO: 899 - RNA, 36 nt, Streptococcus mutans; identical to SEQ ID NO: 839

SEQ ID NO: 900 - RNA, 36 nt, Streptococcus pyogenes; identical to SEQ ID NO: 838

SEQ ID NO: 901 - RNA, 36 nt, Fusobacterium nucleatum
auuuuuaauuuaaguaauaaaaaauggagcauauac

SEQ ID NO: 902 - RNA, 36 nt, Filifactor alocis
aguugacuaccauaugagauuacacuacacgguuca

SEQ ID NO: 903 - RNA, 36 nt, Treponema denticola; identical to SEQ ID NO: 844

SEQ ID NO: 904 - RNA, 36 nt, Solobacterium moorei
cuuauaccaguaagauaauuuacauaguaaguucaa

SEQ ID NO: 905 - RNA, 36 nt, Veillonella atypica
guuuuggagguuuacagaauuacacuacgaguucaa

SEQ ID NO: 906 - RNA, 36 nt, Finegoldia magna
guuuaauaccuauaugagauuacaucaugaguucaa

SEQ ID NO: 907 - RNA, 36 nt, Olsenella uli; identical to SEQ ID NO: 869

SEQ ID NO: 908 - RNA, 36 nt, Lactobacillus rhamnosus
caacuugaauugauugaucugacaucuacgaguuga

SEQ ID NO: 909 - RNA, 36 nt, Lactobacillus gasseri
ugauuagauuucauugaucuaacagccaucuaaaac

SEQ ID NO: 910 - RNA, 36 nt, Lactobacillus gasseri
acacuaaacuuuauugaucuaacaaccagauuuaaa

SEQ ID NO: 911 - RNA, 36 nt, Oenococcus kitaharae
ggguucuaccucauugaucugacacacagcauugaa

SEQ ID NO: 912 - RNA, 36 nt, Bifidobacterium bifidum; identical to SEQ ID NO: 848

SEQ ID NO: 913 - RNA, 36 nt, Staphylococcus pseudintermedius
guuuuacuucuuucuaaauaaacauaguuaaguuaa

SEQ ID NO: 914 - RNA, 36 nt, Eubacterium rectale
auuuuauagucacguaaauuuuucagaucuacuaaa

SEQ ID NO: 915 - RNA, 38 nt, Enterococcus faecalis
auuuuacugauaagaaauuauugagaaucuacaaaaau

SEQ ID NO: 916 - RNA, 36 nt, Streptococcus thermophilus; identical to SEQ ID NO: 841

SEQ ID NO: 917 - RNA, 36 nt, Staphylococcus lugdunensis
cuuguacuuauaccuaaaauuacagaaucuacugaa

SEQ ID NO: 918 - RNA, 36 nt, Eubacterium dolichum
aucauaaucuagcaaaaguuuauaugaucuaacaaa

SEQ ID NO: 919 - RNA, 36 nt, Mycoplasma mobile; identical to SEQ ID NO: 856

SEQ ID NO: 920 - RNA, 36 nt, Mycoplasma ovipneumoniae
auuuuacucuaguaagaaauugucgcacaaaaauaa

SEQ ID NO: 921 - RNA, 36 nt, Mycoplasma gallisepticum
auuauugcuuacacaauuauugucgugcuaaaauaa

SEQ ID NO: 922 - RNA, 36 nt, Mycoplasma canis
auuauuguuuacccaaauauuguacauccuaaauca

SEQ ID NO: 923 - RNA, 36 nt, Mycoplasma synoviae
uacuuacuuaacaaaauaauuguacgauuccaaaau

SEQ ID NO: 924 - RNA, 36 nt, Aminomonas paucivorans
gccuucccucccugccgaaggagcagauccucuccu

SEQ ID NO: 925 - RNA, 36 nt, Clostridium perfringens
uuauaguaacuaguuaaacucucgauaugcuauacc

SEQ ID NO: 926 - RNA, 36 nt, Clostridium cellulolyticum
auuauagcaacaauucaggcuccgauaugccauaau

SEQ ID NO: 927 - RNA, 36 nt, Acidovorax ebreus; identical to SEQ ID NO: 858

SEQ ID NO: 928 - RNA, 36 nt, Neisseria meningitidis; identical to SEQ ID NO: 845

SEQ ID NO: 929 - RNA, 36 nt, Pasteurella multocida
auuguugcacugcgaaaugagagacguugcuacaau

SEQ ID NO: 930 - RNA, 36 nt, phylotype Rs-D17
uuuguaacuuaucugagagaggaugguuauuauaau

SEQ ID NO: 931 - RNA, 36 nt, Wolinella succinogenes; identical to SEQ ID NO: 859

SEQ ID NO: 932 - RNA, 36 nt, Campylobacter jejuni
auaauacaaaaaucauuuuuuuaaacaaacauaaac

SEQ ID NO: 933 - RNA, 36 nt, Campylobacter jejuni
uauaaucucauaagaaauuuaaaaagggacuaaaau

SEQ ID NO: 934 - RNA, 36 nt, Helicobacter mustelae
guauuugucaauaaauauacuuuauaauggcaagau

SEQ ID NO: 935 - RNA, 36 nt, Roseburia intestinalis
uuguaauaaccuaauuaucacuugguaugauauaau

SEQ ID NO: 936 - RNA, 36 nt, Lactobacillus coryniformis
uuuuauucuauaguaaguuuucagcuaaaauagauc

SEQ ID NO: 937 - RNA, 36 nt, Rhodopseudomonas palustris; identical to SEQ ID NO: 868

SEQ ID NO: 938 - RNA, 36 nt, Cand. Puniceispirillum marinum
uaaccauaggcuccucaaucaccagaguguuauugc

SEQ ID NO: 939 - RNA, 36 nt, Verminephrobacter eiseniae; identical to SEQ ID NO: 873

SEQ ID NO: 940 - RNA, 36 nt, Ralstonia syzygii
guuaguagcaaagcgcaauucccgaucugcuggaaa

SEQ ID NO: 941 - RNA, 36 nt, Azospirillum B510
uuaacggcuggacccccgauccccaucgaauuucca

SEQ ID NO: 942 - RNA, 36 nt, Dinoroseobacter shibae; identical to SEQ ID NO: 872

SEQ ID NO: 943 - RNA, 36 nt, Rhodospirillum rubrum; identical to SEQ ID NO: 870

SEQ ID NO: 944 - RNA, 36 nt, Rhodospirillum rubrum; identical to SEQ ID NO: 871

SEQ ID NO: 945 - RNA, 36 nt, Spirochaeta Buddy
auuagagauaaucgcugguuuuuguuaagauauaac

SEQ ID NO: 946 - RNA, 36 nt, Prevotella ruminicola; identical to SEQ ID NO: 862

SEQ ID NO: 947 - RNA, 36 nt, Flavobacterium columnare
agauaaaauuauucuaaucuuuaaucuuaucacaau

SEQ ID NO: 948 - RNA, 36 nt, Parvibaculum lavamentivorans
cuugcgaaaagcgaccgccucucgauuugcuacaga

SEQ ID NO: 949 - RNA, 44 nt, Capnocytophaga ochracea; identical to SEQ ID NO: 857

SEQ ID NO: 950 - RNA, 48 nt, Fibrobacter succinogenes; identical to SEQ ID NO: 863

SEQ ID NO: 951 - RNA, 36 nt, Nitratifractor salsuginis; identical to SEQ ID NO: 853

SEQ ID NO: 952 - RNA, 36 nt, Akkermansia muciniphila
cuuauacgggaacuccacgauaaggcauuuuacaug

SEQ ID NO: 953 - RNA, 88 nt, Artificial Sequence
  Synthetic sequence
uuggaaccauucaaaacagcauagcaaguuaaaauaaggcuaguccguuaucaacuugaaaaaguggcaccgagucggugcuuuuuuu

SEQ ID NO: 954 - RNA, 77 nt, Artificial Sequence
  Synthetic sequence
caaaacagcauagcaaguuaaaauaaggcuaguccguuaucaacuugaaaaaguggcaccgagucggugcuuuuuuu

SEQ ID NO: 955 - RNA, 61 nt, Artificial Sequence
  Synthetic sequence
caaaacagcauagcaaguuaaaauaaggcuaguccguuaucaacuugaaaaaguuuuuuuu

SEQ ID NO: 956 - RNA, 44 nt, Artificial Sequence
  Synthetic sequence
caaaacagcauagcaaguuaaaauaaggcuaguccguuuuuuuu

SEQ ID NO: 957 - RNA, 72 nt, Artificial Sequence
  Synthetic sequence
caaaacagcauagcaaguuaaaauaaggcuaguccgguucacugccguauaggcagcuaagaaauuuuuuuu

SEQ ID NO: 958 - RNA, 14 nt, Artificial Sequence
  Synthetic sequence
uagcaaguuaaaau

SEQ ID NO: 959 - RNA, 102 nt, Artificial Sequence
  Synthetic sequence
  misc_feature (1)..(80): n is a, c, g, or u
nnnnnnnnnnnnnnnnnnnnnnnnnnnnnnnnnnnnnnnnnnnnnnnnnnnnnnnnnnnnnnnnnnnnnnnnnnnnnnnnguuuuagagcuaugcuguuuug

SEQ ID NO: 960 - RNA, 102 nt, Artificial Sequence
  Synthetic sequence
  misc_feature (1)..(80): n is a, c, g, or u
nnnnnnnnnnnnnnnnnnnnnnnnnnnnnnnnnnnnnnnnnnnnnnnnnnnnnnnnnnnnnnnnnnnnnnnnnnnnnnnnguuuuagagcuauguuauuuug

SEQ ID NO: 961 - RNA, 92 nt, exemplary
  misc_feature (1)..(80): n is a, c, g, or u
nnnnnnnnnnnnnnnnnnnnnnnnnnnnnnnnnnnnnnnnnnnnnnnnnnnnnnnnnnnnnnnnnnnnnnnnnnnnnnnnguuuuagagcua

SEQ ID NO: 962 - RNA, 152 nt, Artificial Sequence
  Synthetic sequence
  misc_feature (37)..(116): n is a, c, g, or u
guuuuagagcuaugcuguuuugaauggucccaaaacnnnnnnnnnnnnnnnnnnnnnnnnnnnnnnnnnnnnnnnnnnnnnnnnnnnnnnnnnnnnnnnnnnnnnnnnnnnnnnnnguuuuagagcuaugcuguuuugaauggucccaaaac

SEQ ID NO: 963 - RNA, 188 nt, Artificial Sequence
  Synthetic sequence
  misc_feature (37)..(116): n is a, c, g, or u
guuuuagagcuaugcuguuuugaauggucccaaaacnnnnnnnnnnnnnnnnnnnnnnnnnnnnnnnnnnnnnnnnnnnnnnnnnnnnnnnnnnnnnnnnnnnnnnnnnnnnnnnnguuuuagagcuaugcuguuuugaauggucccaaaacguuuuagagcuaugcuguuuugaauggucccaaaac

SEQ ID NO: 964 - RNA, 22 nt, exemplary
guuuuagagcuaugcuguuuug

SEQ ID NO: 965 - RNA, 36 nt, Streptococcus pyogenes
guuuuagagcuaugcuguuuugaauggucccaaaac

SEQ ID NO: 966 - RNA, 36 nt, Pasteurella multocida
guuguaguucccucucucauuucgcagugcuacaau

SEQ ID NO: 967 - RNA, 36 nt, Mycoplasma mobile
guuuugguguaguaucauucuuauguauucuuaaac

SEQ ID NO: 968 - RNA, 37 nt, Francisella novicida
guuucaguugcugaauuauuugguaaacuacuguuag

SEQ ID NO: 969 - RNA, 33 nt, Francisella novicida
guuucaguugcugaauuauuugguaaacuacug

SEQ ID NO: 970 - RNA, 36 nt, Streptococcus mutans
guuuuagagcuguguuguuucgaaugguuccaaaac

SEQ ID NO: 971 - RNA, 36 nt, Streptococcus thermophilus; identical to SEQ ID NO: 970

SEQ ID NO: 972 - RNA, 36 nt, Streptococcus thermophilus
guuuuuguacucucaagauuuaaguaacuguacaac

SEQ ID NO: 973 - RNA, 36 nt, Listeria innocua
guuuuagagcuauguuauuuugaaugcuaacaaaac

SEQ ID NO: 974 - RNA, 36 nt, Treponema denticola
guuugagaguuguguaauuuaagauggaucucaaac

SEQ ID NO: 975 - RNA, 36 nt, Neisseria meningitidis
guuguagcucccuuucucauuucgcagugcuacaau

SEQ ID NO: 976 - RNA, 36 nt, Streptococcus gordonii; identical to SEQ ID NO: 972

SEQ ID NO: 977 - RNA, 35 nt, Bifidobacterium bifidum
guuucaaugccugucagaucaaugacuuugaccac

SEQ ID NO: 978 - RNA, 36 nt, Lactobacillus salivarius
guuucagaaguauguuaaaucaauaagguuaagacc

SEQ ID NO: 979 - RNA, 37 nt, Francisella novicida
cuaacaguaguuuaccaaauaauucagcaacugaaac

SEQ ID NO: 980 - RNA, 37 nt, Francisella novicida; identical to SEQ ID NO: 979

SEQ ID NO: 981 - RNA, 37 nt, Legionella pneumophila
ccaauaaucccucaucuaaaaauccaaccacugaaac

SEQ ID NO: 982 - RNA, 36 nt, Nitratifractor salsuginis
guuuuaagaccccucaaaaccccacccuguuacaau

SEQ ID NO: 983 - RNA, 36 nt, Butyrivibrio fibrisolvens
guuuuaguacccgggaaaauuaagugauuggaaaac

SEQ ID NO: 984 - RNA, 36 nt, Streptobacillus moniliformis
gauacagauucuugguaaauuugaauaaugugaaug

SEQ ID NO: 985 - RNA, 36 nt, Mycoplasma mobile; identical to SEQ ID NO: 967

SEQ ID NO: 986 - RNA, 44 nt, Capnocytophaga ochracea
uguuaucaaucgcaaaacuacaaaauuugaaagcaauucacaac

SEQ ID NO: 987 - RNA, 36 nt, Acidovorax ebreus
aguguagcuauccggggugagagagggagcuacaac

SEQ ID NO: 988 - RNA, 36 nt, Wolinella succinogenes
auuauagcgaggaauggcugaguaggcggcuauaac

SEQ ID NO: 989 - RNA, 37 nt, Wolinella succinogenes
gcaacacuuuauagcaaauccgcuuagccugugaaac

SEQ ID NO: 990 - RNA, 37 nt, Wolinella succinogenes; identical to SEQ ID NO: 989

SEQ ID NO: 991 - RNA, 36 nt, Prevotella ruminicola
guugugguuugauguaggaaaggaaugauauacaac

SEQ ID NO: 992 - RNA, 48 nt, Fibrobacter succinogenes
guuguuauugcacuaguaaaacuagaaaaucugaaagcaauucacaac

SEQ ID NO: 993 - RNA, 36 nt, Campylobacter jejuni
auuuuaccauaaagaaauuuaaaaagggacuaaaac

SEQ ID NO: 994 - RNA, 36 nt, Campylobacter jejuni
guuuuagucccuuuuuaaauuucuuuaugguaaaau

SEQ ID NO: 995 - RNA, 36 nt, Pasteurella multocida
auuguagcacugcgaaaugagagagggaacuacaac

SEQ ID NO: 996 - RNA, 36 nt, Rhodopseudomonas palustris
agccuaccacggggaaaucgguagggaagccacggc

SEQ ID NO: 997 - RNA, 36 nt, Olsenella uli
guuuuggggcagugucguuuugacugguaaucaaac

SEQ ID NO: 998 - RNA, 36 nt, Rhodospirillum rubrum
acucuaccauggcggugugggacggggccauggaac

SEQ ID NO: 999 - RNA, 36 nt, Rhodospirillum rubrum; identical to SEQ ID NO: 998

SEQ ID NO: 1000 - RNA, 36 nt, Dinoroseobacter shibae
aguuuagcuguucagaauucgggguccagccgcaac

SEQ ID NO: 1001 - RNA, 36 nt, Verminephrobacter eiseniae
auuguagcucacugggauaugcgcacuggccggaac

SEQ ID NO: 1002 - RNA, 37 nt, Francisella novicida; identical to SEQ ID NO: 968

SEQ ID NO: 1003 - RNA, 37 nt, Francisella novicida; identical to SEQ ID NO: 968

SEQ ID NO: 1004 - RNA, 37 nt, Wolinella succinogenes; identical to SEQ ID NO: 989

SEQ ID NO: 1005 - RNA, 37 nt, Wolinella succinogenes; identical to SEQ ID NO: 989

SEQ ID NO: 1006 - RNA, 37 nt, gamma proteobacterium
guuucagagcuuaucccaacaaaccaacagcugaaac

SEQ ID NO: 1007 - RNA, 37 nt, gamma proteobacterium; identical to SEQ ID NO: 1006

SEQ ID NO: 1008 - RNA, 37 nt, Sutterella wadsworthensis
gcgaagaucauaacgcuacgagcuauagcacugaaac

SEQ ID NO: 1009 - RNA, 37 nt, Sutterella wadsworthensis; identical to SEQ ID NO: 1008

SEQ ID NO: 1010 - RNA, 37 nt, Legionella pneumophila; identical to SEQ ID NO: 981

SEQ ID NO: 1011 - RNA, 36 nt, Listeria innocua; identical to SEQ ID NO: 973

SEQ ID NO: 1012 - RNA, 36 nt, Streptococcus thermophilus; identical to SEQ ID NO: 970

SEQ ID NO: 1013 - RNA, 36 nt, Streptococcus mutans; identical to SEQ ID NO: 970

SEQ ID NO: 1014 - RNA, 36 nt, Streptococcus pyogenes; identical to SEQ ID NO: 965

SEQ ID NO: 1015 - RNA, 36 nt, Fusobacterium nucleatum
guuugagaguaauguuauuuuaaauagauucaaaac

SEQ ID NO: 1016 - RNA, 36 nt, Filifactor alocis
guuugagaguaguguaauuucauaugguagucaaac

SEQ ID NO: 1017 - RNA, 36 nt, Treponema denticola; identical to SEQ ID NO: 974

SEQ ID NO: 1018 - RNA, 36 nt, Solobacterium moorei
guuugagaacuauguaaauuaugcugguagcaaaac

SEQ ID NO: 1019 - RNA, 36 nt, Veillonella atypica
guuugcgaguaguguaauucuguaaaucucuaaaac

SEQ ID NO: 1020 - RNA, 36 nt, Finegoldia magna
guuugagaaugauguaauuucauauagguauuaaac

SEQ ID NO: 1021 - RNA, 36 nt, Olsenella uli; identical to SEQ ID NO: 997

SEQ ID NO: 1022 - RNA, 36 nt, Lactobacillus rhamnosus
gucucagguagaugucagaucaaucaguucaagagc

SEQ ID NO: 1023 - RNA, 36 nt, Lactobacillus gasseri
guuuuagaugguuguuagaucaauaagguuuagauc

SEQ ID NO: 1024 - RNA, 36 nt, Lactobacillus gasseri; identical to SEQ ID NO: 1023

SEQ ID NO: 1025 - RNA, 36 nt, Oenococcus kitaharae
gcuucagaugugugucagaucaaugagguagaaccc

SEQ ID NO: 1026 - RNA, 36 nt, Bifidobacterium bifidum
guuucagaugccugucagaucaaugacuuugaccac

SEQ ID NO: 1027 - RNA, 36 nt, Staphylococcus pseudintermedius
guuuuagcacuauguuuauuuagaaagagguaaaac

SEQ ID NO: 1028 - RNA, 36 nt, Eubacterium rectale
auuuuaguaacugaauaauuuacgugacuguaaaac

SEQ ID NO: 1029 - RNA, 36 nt, Enterococcus faecalis
guuuuuguauucucaauaauuucuuaucaguaaaac

SEQ ID NO: 1030 - RNA, 36 nt, Streptococcus thermophilus; identical to SEQ ID NO: 972

SEQ ID NO: 1031 - RNA, 36 nt, Staphylococcus lugdunensis
guuuuaguacucuguaauuuuagguauaagugauac

SEQ ID NO: 1032 - RNA, 36 nt, Eubacterium dolichum
guuuuguuaccauauggauuuuugcuagauuaagac

SEQ ID NO: 1033 - RNA, 36 nt, Mycoplasma mobile; identical to SEQ ID NO: 967

SEQ ID NO: 1034 - RNA, 36 nt, Mycoplasma ovipneumoniae
guuuuugugcuguacaauuucuuacuagaguaaaac

SEQ ID NO: 1035 - RNA, 36 nt, Mycoplasma gallisepticum
guuuuagcacuguacaauacuuguguaagcaauaac

SEQ ID NO: 1036 - RNA, 36 nt, Mycoplasma canis
guuuuaguguuguacaauauuuggguaaacaauaac

SEQ ID NO: 1037 - RNA, 36 nt, Mycoplasma synoviae
guuuugggguuguacaauuauuuuguuaaguaaaac

SEQ ID NO: 1038 - RNA, 36 nt, Aminomonas paucivorans
agcauagcauuucggagugcggcagggagcuaugac

SEQ ID NO: 1039 - RNA, 36 nt, Clostridium perfringens
auuauagcauaucgagaauuuacuaggaacuauaac

SEQ ID NO: 1040 - RNA, 36 nt, Clostridium cellulolyticum
auuauagcauaucggagccugaauuggagcuauaac

SEQ ID NO: 1041 - RNA, 36 nt, Acidovorax ebreus; identical to SEQ ID NO: 987

SEQ ID NO: 1042 - RNA, 36 nt, Neisseria meningitidis; identical to SEQ ID NO: 975

SEQ ID NO: 1043 - RNA, 36 nt, Pasteurella multocida; identical to SEQ ID NO: 966

SEQ ID NO: 1044 - RNA, 36 nt, phylotype Rs-D17
guuauaguuuccuuccucucucagaugugcuauaau

SEQ ID NO: 1045 - RNA, 36 nt, Wolinella succinogenes; identical to SEQ ID NO: 988

SEQ ID NO: 1046 - RNA, 36 nt, Campylobacter jejuni; identical to SEQ ID NO: 994

SEQ ID NO: 1047 - RNA, 36 nt, Campylobacter jejuni; identical to SEQ ID NO: 994

SEQ ID NO: 1048 - RNA, 36 nt, Helicobacter mustelae
auuuuagcauaaacauauuuaugaaguggcuaaaac

SEQ ID NO: 1049 - RNA, 36 nt, Roseburia intestinalis
auuauaccauaccaagugauaacagggaauuacaac

SEQ ID NO: 1050 - RNA, 36 nt, Lactobacillus coryniformis
gaucuauuuuagcugaaaacugaaggaaucaauagc

SEQ ID NO: 1051 - RNA, 36 nt, Rhodopseudomonas palustris; identical to SEQ ID NO: 996

SEQ ID NO: 1052 - RNA, 36 nt, Cand. Puniceispirillum marinum
aguauagcacucuggugauugagagccuagagcaac

SEQ ID NO: 1053 - RNA, 36 nt, Verminephrobacter eiseniae; identical to SEQ ID NO: 1001

SEQ ID NO: 1054 - RNA, 36 nt, Ralstonia syzygii
agguuagcagaucgggaauugcgcucuggcuacaac

SEQ ID NO: 1055 - RNA, 36 nt, Azospirillum B510
aguguagccgauggggaucggggguccagccgcaac

SEQ ID NO: 1056 - RNA, 36 nt, Dinoroseobacter shibae; identical to SEQ ID NO: 1000

SEQ ID NO: 1057 - RNA, 36 nt, Rhodospirillum rubrum; identical to SEQ ID NO: 998

SEQ ID NO: 1058 - RNA, 36 nt, Rhodospirillum rubrum; identical to SEQ ID NO: 998

SEQ ID NO: 1059 - RNA, 36 nt, Spirochaeta Buddy
ggucaaucuuaacaaaaaucagcggucauccccaac

SEQ ID NO: 1060 - RNA, 36 nt, Prevotella ruminicola; identical to SEQ ID NO: 991

SEQ ID NO: 1061 - RNA, 36 nt, Flavobacterium columnare
guugugguuugauuaaagauuagaaaacacgauauu

SEQ ID NO: 1062 - RNA, 36 nt, Parvibaculum lavamentivorans
agaguagcaaaucgagagacggccgcaauccgcagc

SEQ ID NO: 1063 - RNA, 44 nt, Capnocytophaga ochracea; identical to SEQ ID NO: 986

SEQ ID NO: 1064 - RNA, 48 nt, Fibrobacter succinogenes; identical to SEQ ID NO: 992

SEQ ID NO: 1065 - RNA, 36 nt, Nitratifractor salsuginis; identical to SEQ ID NO: 982

SEQ ID NO: 1066 - RNA, 36 nt, Akkermansia muciniphila
guuguacugugccuuauuuuggauucaaggcaaaac

SEQ ID NO: 1067 - RNA, 44 nt, Artificial Sequence
  Synthetic sequence
guuuuagagcuagaaauagcaaguuaaaauaaggcuaguccguu

SEQ ID NO: 1068 - RNA, 60 nt, Artificial Sequence
  Synthetic sequence
  misc_feature (13)..(17): n is a, c, g, or u
guuuuagagcuannnnnuagcaaguuaaaauaaguuaaaauaaggcuaguccguuaucaa

SEQ ID NO: 1069 - RNA, 68 nt, Artificial Sequence
  Synthetic sequence
guuuuagagcuaugcugaaaagcauagcaaguuaaaaauaaguuaaaauaaggcuaguccguuaucaa

SEQ ID NO: 1070 - RNA, 69 nt, Artificial Sequence
  Synthetic sequence
guuuuagagcuaugcuguuuuggaaacaaaacagcauagcaaguuaaaauaaggcuaguccguuaucaa

SEQ ID NO: 1071 - RNA, 70 nt, Artificial Sequence
  Synthetic sequence
guuuuagagcuaguuuuagagcuagaaauagcaaguuaaaauuagcaaguuaaaauaaggcuaguccguu

SEQ ID NO: 1072 - RNA, 70 nt, Artificial Sequence
  Synthetic sequence
guuuuagagcuauagcaaguuaaaaugaaaguuuuagagcuauagcaaguuaaaauaaggcuaguccguu

SEQ ID NO: 1073 - RNA, 74 nt, Artificial Sequence
  Synthetic sequence
guuuuagagcuagaaauagcaaguuaaaauguuuuagagcuagaaauagcaaguuaaaauaaggcuaguccguu

SEQ ID NO: 1074 - RNA, 119 nt, Artificial Sequence
  Synthetic sequence
guuuuagagcuaugcuguuuuggaaacaaaacagcauagcaaguuaaaauguuuuagagcuaugcuguuuuggaaacaaaacagcauagcaaguuaaaauaaggcuaguccguuaucaa

SEQ ID NO: 1075 - RNA, 12 nt, Artificial Sequence
  Synthetic sequence
guuuuagagcua

SEQ ID NO: 1076 - protein, 1368 aa, Artificial Sequence
  Synthetic sequence
MDKKYSIGLAIGTNSVGWAVITDEYKVPSKKFKVLGNTDRHSIKKNLIGALLFDSGETAEATRLKRTARRRYTRRKNRICYLQEIFSNEMAKVDDSFFHRLEESFLVEEDKKHERHPIFGNIVDEVAYHEKYPTIYHLRKKLVDSTDKADLRLIYLALAHMIKFRGHFLIEGDLNPDNSDVDKLFIQLVQTYNQLFEENPINASGVDAKAILSARLSKSRRLENLIAQLPGEKKNGLFGNLIALSLGLTPNFKSNFDLAEDAKLQLSKDTYDDDLDNLLAQIGDQYADLFLAAKNLSDAILLSDILRVNTEITKAPLSASMIKRYDEHHQDLTLLKALVRQQLPEKYKEIFFDQSKNGYAGYIDGGASQEEFYKFIKPILEKMDGTEELLVKLNREDLLRKQRTFDNGSIPHQIHLGELHAILRRQEDFYPFLKDNREKIEKILTFRIPYYVGPLARGNSRFAWMTRKSEETITPWNFEEVVDKGASAQSFIERMTNFDKNLPNEKVLPKHSLLYEYFTVYNELTKVKYVTEGMRKPAFLSGEQKKAIVDLLFKTNRKVTVKQLKEDYFKKIECFDSVEISGVEDRFNASLGTYHDLLKIIKDKDFLDNEENEDILEDIVLTLTLFEDREMIEERLKTYAHLFDDKVMKQLKRRRYTGWGRLSRKLINGIRDKQSGKTILDFLKSDGFANRNFMQLIHDDSLTFKEDIQKAQVSGQGDSLHEHIANLAGSPAIKKGILQTVKVVDELVKVMGRHKPENIVIEMARENQTTQKGQKNSRERMKRIEEGIKELGSQILKEHPVENTQLQNEKLYLYYLQNGRDMYVDQELDINRLSDYDVDHIVPQSFLKDDSIDNKVLTRSDKNRGKSDNVPSEEVVKKMKNYWRQLLNAKLITQRKFDNLTKAERGGLSELDKAGFIKRQLVETRQITKHVAQILDSRMNTKYDENDKLIREVKVITLKSKLVSDFRKDFQFYKVREINNYHHAHDAYLNAVVGTALIKKYPKLESEFVYGDYKVYDVRKMIAKSEQEIGKATAKYFFYSNIMNFFKTEITLANGEIRKRPLIETNGETGEIVWDKGRDFATVRKVLSMPQVNIVKKTEVQTGGFSKESILPKRNSDKLIARKKDWDPKKYGGFDSPTVAYSVLVVAKVEKGKSKKLKSVKELLGITIMERSSFEKNPIDFLEAKGYKEVKKDLIIKLPKYSLFELENGRKRMLASAGELQKGNELALPSKYVNFLYLASHYEKLKGSPEDNEQKQLFVEQHKHYLDEIIEQISEFSKRVILADANLDKVLSAYNKHRDKPIREQAENIIHLFTLTNLGAPAAFKYFDTTIDRKRYTSTKEVLDATLIHQSITGLYETRIDLSQLGGD

SEQ ID NO: 1077 - protein, 1368 aa, Artificial Sequence
  Synthetic sequence
MDKKYSIGLDIGTNSVGWAVITDEYKVPSKKFKVLGNTDRHSIKKNLIGALLFDSGETAEATRLKRTARRRYTRRKNRICYLQEIFSNEMAKVDDSFFHRLEESFLVEEDKKHERHPIFGNIVDEVAYHEKYPTIYHLRKKLVDSTDKADLRLIYLALAHMIKFRGHFLIEGDLNPDNSDVDKLFIQLVQTYNQLFEENPINASGVDAKAILSARLSKSRRLENLIAQLPGEKKNGLFGNLIALSLGLTPNFKSNFDLAEDAKLQLSKDTYDDDLDNLLAQIGDQYADLFLAAKNLSDAILLSDILRVNTEITKAPLSASMIKRYDEHHQDLTLLKALVRQQLPEKYKEIFFDQSKNGYAGYIDGGASQEEFYKFIKPILEKMDGTEELLVKLNREDLLRKQRTFDNGSIPHQIHLGELHAILRRQEDFYPFLKDNREKIEKILTFRIPYYVGPLARGNSRFAWMTRKSEETITPWNFEEVVDKGASAQSFIERMTNFDKNLPNEKVLPKHSLLYEYFTVYNELTKVKYVTEGMRKPAFLSGEQKKAIVDLLFKTNRKVTVKQLKEDYFKKIECFDSVEISGVEDRFNASLGTYHDLLKIIKDKDFLDNEENEDILEDIVLTLTLFEDREMIEERLKTYAHLFDDKVMKQLKRRRYTGWGRLSRKLINGIRDKQSGKTILDFLKSDGFANRNFMQLIHDDSLTFKEDIQKAQVSGQGDSLHEHIANLAGSPAIKKGILQTVKVVDELVKVMGRHKPENIVIEMARENQTTQKGQKNSRERMKRIEEGIKELGSQILKEHPVENTQLQNEKLYLYYLQNGRDMYVDQELDINRLSDYDVDAIVPQSFLKDDSIDNKVLTRSDKNRGKSDNVPSEEVVKKMKNYWRQLLNAKLITQRKFDNLTKAERGGLSELDKAGFIKRQLVETRQITKHVAQILDSRMNTKYDENDKLIREVKVITLKSKLVSDFRKDFQFYKVREINNYHHAHDAYLNAVVGTALIKKYPKLESEFVYGDYKVYDVRKMIAKSEQEIGKATAKYFFYSNIMNFFKTEITLANGEIRKRPLIETNGETGEIVWDKGRDFATVRKVLSMPQVNIVKKTEVQTGGFSKESILPKRNSDKLIARKKDWDPKKYGGFDSPTVAYSVLVVAKVEKGKSKKLKSVKELLGITIMERSSFEKNPIDFLEAKGYKEVKKDLIIKLPKYSLFELENGRKRMLASAGELQKGNELALPSKYVNFLYLASHYEKLKGSPEDNEQKQLFVEQHKHYLDEIIEQISEFSKRVILADANLDKVLSAYNKHRDKPIREQAENIIHLFTLTNLGAPAAFKYFDTTIDRKRYTSTKEVLDATLIHQSITGLYETRIDLSQLGGD

SEQ ID NO: 1078 - protein, 1368 aa, Artificial Sequence
  Synthetic sequence
MDKKYSIGLAIGTNSVGWAVITDEYKVPSKKFKVLGNTDRHSIKKNLIGALLFDSGETAEATRLKRTARRRYTRRKNRICYLQEIFSNEMAKVDDSFFHRLEESFLVEEDKKHERHPIFGNIVDEVAYHEKYPTIYHLRKKLVDSTDKADLRLIYLALAHMIKFRGHFLIEGDLNPDNSDVDKLFIQLVQTYNQLFEENPINASGVDAKAILSARLSKSRRLENLIAQLPGEKKNGLFGNLIALSLGLTPNFKSNFDLAEDAKLQLSKDTYDDDLDNLLAQIGDQYADLFLAAKNLSDAILLSDILRVNTEITKAPLSASMIKRYDEHHQDLTLLKALVRQQLPEKYKEIFFDQSKNGYAGYIDGGASQEEFYKFIKPILEKMDGTEELLVKLNREDLLRKQRTFDNGSIPHQIHLGELHAILRRQEDFYPFLKDNREKIEKILTFRIPYYVGPLARGNSRFAWMTRKSEETITPWNFEEVVDKGASAQSFIERMTNFDKNLPNEKVLPKHSLLYEYFTVYNELTKVKYVTEGMRKPAFLSGEQKKAIVDLLFKTNRKVTVKQLKEDYFKKIECFDSVEISGVEDRFNASLGTYHDLLKIIKDKDFLDNEENEDILEDIVLTLTLFEDREMIEERLKTYAHLFDDKVMKQLKRRRYTGWGRLSRKLINGIRDKQSGKTILDFLKSDGFANRNFMQLIHDDSLTFKEDIQKAQVSGQGDSLHEHIANLAGSPAIKKGILQTVKVVDELVKVMGRHKPENIVIEMARENQTTQKGQKNSRERMKRIEEGIKELGSQILKEHPVENTQLQNEKLYLYYLQNGRDMYVDQELDINRLSDYDVDAIVPQSFLKDDSIDNKVLTRSDKNRGKSDNVPSEEVVKKMKNYWRQLLNAKLITQRKFDNLTKAERGGLSELDKAGFIKRQLVETRQITKHVAQILDSRMNTKYDENDKLIREVKVITLKSKLVSDFRKDFQFYKVREINNYHHAHDAYLNAVVGTALIKKYPKLESEFVYGDYKVYDVRKMIAKSEQEIGKATAKYFFYSNIMNFFKTEITLANGEIRKRPLIETNGETGEIVWDKGRDFATVRKVLSMPQVNIVKKTEVQTGGFSKESILPKRNSDKLIARKKDWDPKKYGGFDSPTVAYSVLVVAKVEKGKSKKLKSVKELLGITIMERSSFEKNPIDFLEAKGYKEVKKDLIIKLPKYSLFELENGRKRMLASAGELQKGNELALPSKYVNFLYLASHYEKLKGSPEDNEQKQLFVEQHKHYLDEIIEQISEFSKRVILADANLDKVLSAYNKHRDKPIREQAENIIHLFTLTNLGAPAAFKYFDTTIDRKRYTSTKEVLDATLIHQSITGLYETRIDLSQLGGD

SEQ ID NO: 1079 - protein, 86 aa, Artificial Sequence
  Synthetic sequence
RRRVTVRKADAGGLGISIKGGRENKMPILISKIFKGLAADQTEALFVGDAILSVNGEDLSSATHDEAVQALKKTGKEVVLEVKYMK

SEQ ID NO: 1080 - protein, 251 aa, Artificial Sequence
  Synthetic sequence
KKNSLALSLTADQMVSALLDAEPPILYSEYDPTRPFSEASMMGLLTNLADRELVHMINWAKRVPGFVDLTLHDQVHLLECAWLEILMIGLVWRSMEHPGKLLFAPNLLLDRNQGKCVEGMVEIFDMLLATSSRFRMMNLQGEEFVCLKSIILLNSGVYTFLSSTLKSLEEKDHIHRVLDKITDTLIHLMAKAGLTLQQQHQRLAQLLLILSHIRHMSNKGMEHLYSMKCKNVVPLYDLLLEMLDAHRLHAP

SEQ ID NO: 1081 - protein, 1464 aa, Artificial Sequence
  Synthetic sequence
  MISC_FEATURE (10)..(10): The X at this position can be an Asp or an Ala
  MISC_FEATURE (211)..(212): The X at each of these positions can be independently present or absent and if present, each position can be a Pro, Ser, or Ala.
  MISC_FEATURE (299)..(300): The X at each of these positions can be independently present or absent and if present, each position can be a Pro, Ser, or Ala.
  MISC_FEATURE (936)..(936): The X at this position can be a His or an Ala.
MDKKYSIGLXIGTNSVGWAVITDEYKVPSKKFKVLGNTDRHSIKKNLIGALLFDSGETAEATRLKRTARRRYTRRKNRICYLQEIFSNEMAKVDDSFFHRLEESFLVEEDKKHERHPIFGNIVDEVAYHEKYPTIYHLRKKLVDSTDKADLRLIYLALAHMIKFRGHFLIEGDLNPDNSDVDKLFIQLVQTYNQLFEENPINASGVDAASXXRRRVTVRKADAGGLGISIKGGRENKMPILISKIFKGLAADQTEALFVGDAILSVNGEDLSSATHDEAVQALKKTGKEVVLEVKYMKXXASDAKAILSARLSKSRRLENLIAQLPGEKKNGLFGNLIALSLGLTPNFKSNFDLAEDAKLQLSKDTYDDDLDNLLAQIGDQYADLFLAAKNLSDAILLSDILRVNTEITKAPLSASMIKRYDEHHQDLTLLKALVRQQLPEKYKEIFFDQSKNGYAGYIDGGASQEEFYKFIKPILEKMDGTEELLVKLNREDLLRKQRTFDNGSIPHQIHLGELHAILRRQEDFYPFLKDNREKIEKILTFRIPYYVGPLARGNSRFAWMTRKSEETITPWNFEEVVDKGASAQSFIERMTNFDKNLPNEKVLPKHSLLYEYFTVYNELTKVKYVTEGMRKPAFLSGEQKKAIVDLLFKTNRKVTVKQLKEDYFKKIECFDSVEISGVEDRFNASLGTYHDLLKIIKDKDFLDNEENEDILEDIVLTLTLFEDREMIEERLKTYAHLFDDKVMKQLKRRRYTGWGRLSRKLINGIRDKQSGKTILDFLKSDGFANRNFMQLIHDDSLTFKEDIQKAQVSGQGDSLHEHIANLAGSPAIKKGILQTVKVVDELVKVMGRHKPENIVIEMARENQTTQKGQKNSRERMKRIEEGIKELGSQILKEHPVENTQLQNEKLYLYYLQNGRDMYVDQELDINRLSDYDVDXIVPQSFLKDDSIDNKVLTRSDKNRGKSDNVPSEEVVKKMKNYWRQLLNAKLITQRKFDNLTKAERGGLSELDKAGFIKRQLVETRQITKHVAQILDSRMNTKYDENDKLIREVKVITLKSKLVSDFRKDFQFYKVREINNYHHAHDAYLNAVVGTALIKKYPKLESEFVYGDYKVYDVRKMIAKSEQEIGKATAKYFFYSNIMNFFKTEITLANGEIRKRPLIETNGETGEIVWDKGRDFATVRKVLSMPQVNIVKKTEVQTGGFSKESILPKRNSDKLIARKKDWDPKKYGGFDSPTVAYSVLVVAKVEKGKSKKLKSVKELLGITIMERSSFEKNPIDFLEAKGYKEVKKDLIIKLPKYSLFELENGRKRMLASAGELQKGNELALPSKYVNFLYLASHYEKLKGSPEDNEQKQLFVEQHKHYLDEIIEQISEFSKRVILADANLDKVLSAYNKHRDKPIREQAENIIHLFTLTNLGAPAAFKYFDTTIDRKRYTSTKEVLDATLIHQSITGLYETRIDLSQLGGD

SEQ ID NO: 1082 - protein, 1464 aa, Artificial Sequence
  Synthetic sequence
  MISC_FEATURE (10)..(10): The X at this position can be an Asp or an Ala.
  MISC_FEATURE (840)..(840): The X at this position can be a His or an Ala.
  MISC_FEATURE (1030)..(1031): The X at each of these positions can be independently present or absent and if present, each position can be a Pro, Ser, or Ala.
  MISC_FEATURE (1118)..(1119): The X at each of these positions can be independently present or absent and if present, each position can be a Pro, Ser, or Ala.
MDKKYSIGLXIGTNSVGWAVITDEYKVPSKKFKVLGNTDRHSIKKNLIGALLFDSGETAEATRLKRTARRRYTRRKNRICYLQEIFSNEMAKVDDSFFHRLEESFLVEEDKKHERHPIFGNIVDEVAYHEKYPTIYHLRKKLVDSTDKADLRLIYLALAHMIKFRGHFLIEGDLNPDNSDVDKLFIQLVQTYNQLFEENPINASGVDAKAILSARLSKSRRLENLIAQLPGEKKNGLFGNLIALSLGLTPNFKSNFDLAEDAKLQLSKDTYDDDLDNLLAQIGDQYADLFLAAKNLSDAILLSDILRVNTEITKAPLSASMIKRYDEHHQDLTLLKALVRQQLPEKYKEIFFDQSKNGYAGYIDGGASQEEFYKFIKPILEKMDGTEELLVKLNREDLLRKQRTFDNGSIPHQIHLGELHAILRRQEDFYPFLKDNREKIEKILTFRIPYYVGPLARGNSRFAWMTRKSEETITPWNFEEVVDKGASAQSFIERMTNFDKNLPNEKVLPKHSLLYEYFTVYNELTKVKYVTEGMRKPAFLSGEQKKAIVDLLFKTNRKVTVKQLKEDYFKKIECFDSVEISGVEDRFNASLGTYHDLLKIIKDKDFLDNEENEDILEDIVLTLTLFEDREMIEERLKTYAHLFDDKVMKQLKRRRYTGWGRLSRKLINGIRDKQSGKTILDFLKSDGFANRNFMQLIHDDSLTFKEDIQKAQVSGQGDSLHEHIANLAGSPAIKKGILQTVKVVDELVKVMGRHKPENIVIEMARENQTTQKGQKNSRERMKRIEEGIKELGSQILKEHPVENTQLQNEKLYLYYLQNGRDMYVDQELDINRLSDYDVDXIVPQSFLKDDSIDNKVLTRSDKNRGKSDNVPSEEVVKKMKNYWRQLLNAKLITQRKFDNLTKAERGGLSELDKAGFIKRQLVETRQITKHVAQILDSRMNTKYDENDKLIREVKVITLKSKLVSDFRKDFQFYKVREINNYHHAHDAYLNAVVGTALIKKYPKLESEFVYGDYKVYDVRKMIAKSEHASXXRRRVTVRKADAGGLGISIKGGRENKMPILISKIFKGLAADQTEALFVGDAILSVNGEDLSSATHDEAVQALKKTGKEVVLEVKYMKXXASEQEIGKATAKYFFYSNIMNFFKTEITLANGEIRKRPLIETNGETGEIVWDKGRDFATVRKVLSMPQVNIVKKTEVQTGGFSKESILPKRNSDKLIARKKDWDPKKYGGFDSPTVAYSVLVVAKVEKGKSKKLKSVKELLGITIMERSSFEKNPIDFLEAKGYKEVKKDLIIKLPKYSLFELENGRKRMLASAGELQKGNELALPSKYVNFLYLASHYEKLKGSPEDNEQKQLFVEQHKHYLDEIIEQISEFSKRVILADANLDKVLSAYNKHRDKPIREQAENIIHLFTLTNLGAPAAFKYFDTTIDRKRYTSTKEVLDATLIHQSITGLYETRIDLSQLGGD

SEQ ID NO: 1083 - protein, 1629 aa, Artificial Sequence
  Synthetic sequence
  MISC_FEATURE (10)..(10): The X at this position can be an Asp or an Ala.
  MISC_FEATURE (234)..(235): The X at each of these positions can be independently present or absent and if present, each position can be a Pro, Ser, or Ala.
  MISC_FEATURE (487)..(488): The X at each of these positions can be independently present or absent and if present, each position can be a Pro, Ser, or Ala.
  MISC_FEATURE (1101)..(1101): The X at this position can be a His or an Ala.
MDKKYSIGLXIGTNSVGWAVITDEYKVPSKKFKVLGNTDRHSIKKNLIGALLFDSGETAEATRLKRTARRRYTRRKNRICYLQEIFSNEMAKVDDSFFHRLEESFLVEEDKKHERHPIFGNIVDEVAYHEKYPTIYHLRKKLVDSTDKADLRLIYLALAHMIKFRGHFLIEGDLNPDNSDVDKLFIQLVQTYNQLFEENPINASGVDAKAILSARLSKSRRLENLIAQLPGASXXKKNSLALSLTADQMVSALLDAEPPILYSEYDPTRPFSEASMMGLLTNLADRELVHMINWAKRVPGFVDLTLHDQVHLLECAWLEILMIGLVWRSMEHPGKLLFAPNLLLDRNQGKCVEGMVEIFDMLLATSSRFRMMNLQGEEFVCLKSIILLNSGVYTFLSSTLKSLEEKDHIHRVLDKITDTLIHLMAKAGLTLQQQHQRLAQLLLILSHIRHMSNKGMEHLYSMKCKNVVPLYDLLLEMLDAHRLHAPXXASPGEKKNGLFGNLIALSLGLTPNFKSNFDLAEDAKLQLSKDTYDDDLDNLLAQIGDQYADLFLAAKNLSDAILLSDILRVNTEITKAPLSASMIKRYDEHHQDLTLLKALVRQQLPEKYKEIFFDQSKNGYAGYIDGGASQEEFYKFIKPILEKMDGTEELLVKLNREDLLRKQRTFDNGSIPHQIHLGELHAILRRQEDFYPFLKDNREKIEKILTFRIPYYVGPLARGNSRFAWMTRKSEETITPWNFEEVVDKGASAQSFIERMTNFDKNLPNEKVLPKHSLLYEYFTVYNELTKVKYVTEGMRKPAFLSGEQKKAIVDLLFKTNRKVTVKQLKEDYFKKIECFDSVEISGVEDRFNASLGTYHDLLKIIKDKDFLDNEENEDILEDIVLTLTLFEDREMIEERLKTYAHLFDDKVMKQLKRRRYTGWGRLSRKLINGIRDKQSGKTILDFLKSDGFANRNFMQLIHDDSLTFKEDIQKAQVSGQGDSLHEHIANLAGSPAIKKGILQTVKVVDELVKVMGRHKPENIVIEMARENQTTQKGQKNSRERMKRIEEGIKELGSQILKEHPVENTQLQNEKLYLYYLQNGRDMYVDQELDINRLSDYDVDXIVPQSFLKDDSIDNKVLTRSDKNRGKSDNVPSEEVVKKMKNYWRQLLNAKLITQRKFDNLTKAERGGLSELDKAGFIKRQLVETRQITKHVAQILDSRMNTKYDENDKLIREVKVITLKSKLVSDFRKDFQFYKVREINNYHHAHDAYLNAVVGTALIKKYPKLESEFVYGDYKVYDVRKMIAKSEQEIGKATAKYFFYSNIMNFFKTEITLANGEIRKRPLIETNGETGEIVWDKGRDFATVRKVLSMPQVNIVKKTEVQTGGFSKESILPKRNSDKLIARKKDWDPKKYGGFDSPTVAYSVLVVAKVEKGKSKKLKSVKELLGITIMERSSFEKNPIDFLEAKGYKEVKKDLIIKLPKYSLFELENGRKRMLASAGELQKGNELALPSKYVNFLYLASHYEKLKGSPEDNEQKQLFVEQHKHYLDEIIEQISEFSKRVILADANLDKVLSAYNKHRDKPIREQAENIIHLFTLTNLGAPAAFKYFDTTIDRKRYTSTKEVLDATLIHQSITGLYETRIDLSQLGGD

SEQ ID NO: 1084 - protein, 7 aa, Artificial Sequence
  Synthetic sequence
GVKESLV

SEQ ID NO: 1085 - protein, 47 aa, Artificial Sequence
  Synthetic sequence
NDLDAYEREAEKLEKKNEVLRNRLAALENELATLRQEVASMKQELQS

SEQ ID NO: 1086 - protein, 42 aa, Artificial Sequence
  Synthetic sequence
NEKEELKSKKAELRNRIEQLKQKREQLKQKIANLRKEIEAYK

SEQ ID NO: 1087 - protein, 42 aa, Artificial Sequence
  Synthetic sequence
SIAATLENDLARLENENARLEKDIANLERDLAKLEREEAYFS

SEQ ID NO: 1088 - protein, 107 aa, Artificial Sequence
  Synthetic sequence
GVQVETISPGDGRTFPKRGQTCVVHYTGMLEDGKKFDSSRDRNKPFKFMLGKQEVIRGWEEGVAQMSVGQRAKLTISPDYAYGATGHPGIIPPHATLVFDVELLKLE

SEQ ID NO: 1089 - protein, 292 aa, Artificial Sequence
  Synthetic sequence
LEESVALRIITEGASILRQEKNLLDIDAPVTVCGDIHGQFFDLMKLFEVGGSPANTRYLFLGDYVDRGYFSIECVLYLWALKILYPKTLFLLRGNHECRHLTEYFTFKQECKIKYSERVYDACMDAFDCLPLAALMNQQFLCVHGGLSPEINTLDDIRKLDRFKEPPAYGPMCDILWSDPLEDFGNEKTQEHFTHNTVRGCSYFYSYPAVCEFLQHNNLLSILRAHEAQDAGYRMYRKSQTTGFPSLITIFSAPNYLDVYNNKAAVLKYENNVMNIRQFNCSPHPYWLPNFM

SEQ ID NO: 1090 - protein, 165 aa, Artificial Sequence
  Synthetic sequence
MVNPTVFFDIAVDGEPLGRVSFELFADKVPKTAENFRALSTGEKGFGYKGSCFHRIIPGFMCQGGDFTRHNGTGGKSIYGEKFEDENFILKHTGPGILSMANAGPNTNGSQFFICTAKTEWLDGKHVVFGKVKEGMNIVEAMERFGSRNGKTSKKITIADCGQLE

SEQ ID NO: 1091 - protein, 94 aa, Artificial Sequence
  Synthetic sequence
VAILWHEMWHEGLEEASRLYFGERNVKGMFEVLEPLHAMMERGPQTLKETSFNQAYGRDLMEAQEWCRKYMKSGNVKDLTQAWDLYYHVFRRIS

SEQ ID NO: 1092 - protein, 804 aa, Artificial Sequence
  Synthetic sequence
MSNSYDSSSIKVLKGLDAVRKRPGMYIGDTDDGTGLHHMVFEVVDNAIDEALAGHCKEIIVTIHADNSVSVQDDGRGIPTGIHPEEGVSAAEVIMTVLHAGGKFDDNSYKVSGGLHGVGVSVVNALSQKLELVIQREGKIHRQIYEHGVPQAPLAVTGETEKTGTMVRFWPSLETFTNVTEFEYEILAKRLRELSFLNSGVSIRLRDKRDGKEDHFHYEGGIKAFVEYLNKNKTPIHPNIFYFSTEKDGIGVEVALQWNDGFQENIYCFTNNIPQRDGGTHLAGFRAAMTRTLNAYMDKEGYSKKAKVSATGDDAREGLIAVVSVKVPDPKFSSQTKDKLVSSEVKSAVEQQMNELLAEYLLENPTDAKIVVGKIIDAARAREAARRAREMTRRKGALDLAGLPGKLADCQERDPALSELYLVEGDSAGGSAKQGRNRKNQAILPLKGKILNVEKARFDKMLSSQEVATLITALGCGIGRDEYNPDKLRYHSIIIMTDADVDGSHIRTLLLTFFYRQMPEIVERGHVYIAQPPLYKVKKGKQEQYIKDDEAMDQYQISIALDGATLHTNASAPALAGEALEKLVSEYNATQKMINRMERRYPKAMLKELIYQPTLTEADLSDEQTVTRWVNALVSELNDKEQHGSQWKFDVHTNAEQNLFEPIVRVRTHGVDTDYPLDHEFITGGEYRRICTLGEKLRGLLEEDAFIERGERRQPVASFEQALDWLVKESRRGLSIQRYKGLGEMNPEQLWETTMDPESRRMLRVTVKDAIAADQLFTTLMGDAVEPRRAFIEENALKAANIDI

SEQ ID NO: 1093 - protein, 187 aa, Artificial Sequence
  Synthetic sequence
MVGSLNCIVAVSQNMGIGKNGDLPWPPLRNEFRYFQRMTTTSSVEGKQNLVIMGKKTWFSIPEKNRPLKGRINLVLSRELKEPPQGAHFLSRSLDDALKLTEQPELANKVDMVWIVGGSSVYKEAMNHPGHLKLFVTRIMQDFESDTFFPEIDLEKYKLLPEYPGVLSDVQEEKGIKYKFEVYEKND

SEQ ID NO: 1094 - protein, 111 aa, Artificial Sequence
  Synthetic sequence
MASRGVQVETISPGDGRTFPKRGQTCVVHYTGMLEDGKKVDSSRDRNKPFKFMLGKQEVIRGWEEGVAQMSVGQRAKLTISPDYAYGATGHPGIIPPHATLVFDVELLKLE

SEQ ID NO: 1095 - protein, 183 aa, Artificial Sequence
  Synthetic sequence
MNGDETKKVESEYIKKHHRHELVESQCSSTLVKHIKAPLHLVWSIVRRFDEPQKYKPFISRCVVQGKKLEVGSVREVDLKSGLPATKSTEVLEILDDNEHILGIRIVGGDHRLKNYSSTISLHSETIDGKTGTLAIESFVVDVPEGNTKEETCFFVEALIQCNLNSLADVTERLQAESMEKKI

SEQ ID NO: 1096 - protein, 161 aa, Artificial Sequence
  Synthetic sequence
METSQKYHTCGSTLVQTIDAPLSLVWSILRRFDNPQAYKQFVKTCNLSSGDGGEGSVREVTVVSGLPAEFSRERLDELDDESHVMMISIIGGDHRLVNYRSKTMAFVAADTEEKTVVVESYVVDVPEGNSEEETTSFADTIVGFNLKSLAKLSERVAHLKL

SEQ ID NO: 1097 - protein, 159 aa, Artificial Sequence
  Synthetic sequence
MKTSQEQHVCGSTVVQTINAPLPLVWSILRRFDNPKTFKHFVKTCKLRSGDGGEGSVREVTVVSDLPASFSLERLDELDDESHVMVISIIGGDHRLVNYQSKTTVFVAAEEEKTVVVESYVVDVPEGNTEEETTLFADTIVGCNLRSLAKLSEKMMELT

SEQ ID NO: 1098 - protein, 164 aa, Artificial Sequence
  Synthetic sequence
MESSKQKRCRSSVVETIEAPLPLVWSILRSFDKPQAYQRFVKSCTMRSGGGGGKGGEGKGSVRDVTLVSGFPADFSTERLEELDDESHVMVVSIIGGNHRLVNYKSKTKVVASPEDMAKKTVVVESYVVDVPEGTSEEDTIFFVDNIIRYNLTSLAKLTKKMMK

SEQ ID NO: 1099 - protein, 221 aa, Artificial Sequence
  Synthetic sequence
MANSESSSSPVNEEENSQRISTLHHQTMPSDLTQDEFTQLSQSIAEFHTYQLGNGRCSSLLAQRIHAPPETVWSVVRRFDRPQIYKHFIKSCNVSEDFEMRVGCTRDVNVISGLPANTSRERLDLLDDDRRVTGFSITGGEHRLRNYKSVTTVHRFEKEEEEERIWTVVLESYVVDVPEGNSEEDTRLFADTVIRLNLQKLASITEAMNRNNNNNNSSQVR

SEQ ID NO: 1100 - protein, 190 aa, Artificial Sequence
  Synthetic sequence
MSSSPAVKGLTDEEQKTLEPVIKTYHQFEPDPTTCTSLITQRIHAPASVVWPLIRRFDNPERYKHFVKRCRLISGDGDVGSVREVTVISGLPASTSTERLEFVDDDHRVLSFRVVGGEHRLKNYKSVTSVNEFLNQDSGKVYTVVLESYTVDIPEGNTEEDTKMFVDTVVKLNLQKLGVAATSAPMHDDE

SEQ ID NO: 1101 - protein, 209 aa, Artificial Sequence
  Synthetic sequence
MNLAPIHDPSSSSTTTTSSSTPYGLTKDEFSTLDSIIRTHHTFPRSPNTCTSLIAHRVDAPAHAIWRFVRDFANPNKYKHFIKSCTIRVNGNGIKEIKVGTIREVSVVSGLPASTSVEILEVLDEEKRILSFRVLGGEHRLNNYRSVTSVNEFVVLEKDKKKRVYSVVLESYIVDIPQGNTEEDTRMFVDTVVKSNLQNLAVISTASPT

SEQ ID NO: 1102 - protein, 207 aa, Artificial Sequence
  Synthetic sequence
MLAVHRPSSAVSDGDSVQIPMMIASFQKRFPSLSRDSTAARFHTHEVGPNQCCSAVIQEISAPISTVWSVVRRFDNPQAYKHFLKSCSVIGGDGDNVGSLRQVHVVSGLPAASSTERLDILDDERHVISFSVVGGDHRLSNYRSVTTLHPSPISGTVVVESYVVDVPPGNTKEETCDFVDVIVRCNLQSLAKIAENTAAESKKKMSL

SEQ ID NO: 1103 - protein, 203 aa, Artificial Sequence
  Synthetic sequence
MRSPVQLQHGSDATNGFHTLQPHDQTDGPIKRVCLTRGMHVPEHVAMHHTHDVGPDQCCSSVVQMIHAPPESVWALVRRFDNPKVYKNFIRQCRIVQGDGLHVGDLREVMVVSGLPAVSSTERLEILDEERHVISFSVVGGDHRLKNYRSVTTLHASDDEGTVVVESYIVDVPPGNTEEETLSFVDTIVRCNLQSLARSTNRQ

SEQ ID NO: 1104 - protein, 215 aa, Artificial Sequence
  Synthetic sequence
MPTSIQFQRSSTAAEAANATVRNYPHHHQKQVQKVSLTRGMADVPEHVELSHTHVVGPSQCFSVVVQDVEAPVSTVWSILSRFEHPQAYKHFVKSCHVVIGDGREVGSVREVRVVSGLPAAFSLERLEIMDDDRHVISFSVVGGDHRLMNYKSVTTVHESEEDSDGKKRTRVVESYVVDVPAGNDKEETCSFADTIVRCNLQSLAKLAENTSKFS

SEQ ID NO: 1105 - protein, 211 aa, Artificial Sequence
  Synthetic sequence
MEMIGGDDTDTEMYGALVTAQSLRLRHLHHCRENQCTSVLVKYIQAPVHLVWSLVRRFDQPQKYKPFISRCTVNGDPEIGCLREVNVKSGLPATTSTERLEQLDDEEHILGINIIGGDHRLKNYSSILTVHPEMIDGRSGTMVMESFVVDVPQGNTKDDTCYFVESLIKCNLKSLACVSERLAAQDITNSIATFCNASNGYREKNHTETNL

SEQ ID NO: 1106 - protein, 188 aa, Artificial Sequence
  Synthetic sequence
MEANGIENLTNPNQEREFIRRHHKHELVDNQCSSTLVKHINAPVHIVWSLVRRFDQPQKYKPFISRCVVKGNMEIGTVREVDVKSGLPATRSTERLELLDDNEHILSIRIVGGDHRLKNYSSIISLHPETIEGRIGTLVIESFVVDVPEGNTKDETCYFVEALIKCNLKSLADISERLAVQDTTESRV

SEQ ID NO: 1107 - protein, 187 aa, Artificial Sequence
  Synthetic sequence
MMDGVEGGTAMYGGLETVQYVRTHHQHLCRENQCTSALVKHIKAPLHLVWSLVRRFDQPQKYKPFVSRCTVIGDPEIGSLREVNVKSGLPATTSTERLELLDDEEHILGIKIIGGDHRLKNYSSILTVHPEIIEGRAGTMVIESFVVDVPQGNTKDETCYFVEALIRCNLKSLADVSERLASQDITQ

SEQ ID NO: 1108 - protein, 191 aa, Artificial Sequence
  Synthetic sequence
MPSELTPEERSELKNSIAEFHTYQLDPGSCSSLHAQRIHAPPELVWSIVRRFDKPQTYKHFIKSCSVEQNFEMRVGCTRDVIVISGLPANTSTERLDILDDERRVTGFSIIGGEHRLTNYKSVTTVHRFEKENRIWTVVLESYVVDMPEGNSEDDTRMFADTVVKLNLQKLATVAEAMARNSGDGSGSQVT

SEQ ID NO: 1109 - protein, 434 aa, Artificial Sequence
  Synthetic sequence
MEEVSPAIAGPFRPFSETQMDFTGIRLGKGYCNNQYSNQDSENGDLMVSLPETSSCSVSGSHGSESRKVLISRINSPNLNMKESAAADIVVVDISAGDEINGSDITSEKKMISRTESRSLFEFKSVPLYGFTSICGRRPEMEDAVSTIPRFLQSSSGSMLDGRFDPQSAAHFFGVYDGHGGSQVANYCRERMHLALAEEIAKEKPMLCDGDTWLEKWKKALFNSFLRVDSEIESVAPETVGSTSVVAVVFPSHIFVANCGDSRAVLCRGKTALPLSVDHKPDREDEAARIEAAGGKVIQWNGARVFGVLAMSRSIGDRYLKPSIIPDPEVTAVKRVKEDDCLILASDGVWDVMTDEEACEMARKRILLWHKKNAVAGDASLLADERRKEGKDPAAMSAAEYLSKLAIQRGSKDNISVVVVDLKPRRKLKSKPLN

SEQ ID NO: 1110 - protein, 423 aa, Artificial Sequence
  Synthetic sequence
MDEVSPAVAVPFRPFTDPHAGLRGYCNGESRVTLPESSCSGDGAMKDSSFEINTRQDSLTSSSSAMAGVDISAGDEINGSDEFDPRSMNQSEKKVLSRTESRSLFEFKCVPLYGVTSICGRRPEMEDSVSTIPRFLQVSSSSLLDGRVTNGFNPHLSAHFFGVYDGHGGSQVANYCRERMHLALTEEIVKEKPEFCDGDTWQEKWKKALFNSFMRVDSEIETVAHAPETVGSTSVVAVVFPTHIFVANCGDSRAVLCRGKTPLALSVDHKPDRDDEAARIEAAGGKVIRWNGARVFGVLAMSRSIGDRYLKPSVIPDPEVTSVRRVKEDDCLILASDGLWDVMTNEEVCDLARKRILLWHKKNAMAGEALLPAEKRGEGKDPAAMSAAEYLSKMALQKGSKDNISVVVVDLKGIRKFKSKSLN

SEQ ID NO: 1111 - protein, 612 aa, Artificial Sequence
  Synthetic sequence
MKMDKKTIVWFRRDLRIEDNPALAAAAHEGSVFPVFIWCPEEEGQFYPGRASRWWMKQSLAHLSQSLKALGSDLTLIKTHNTISAILDCIRVTGATKVVFNHLYDPVSLVRDHTVKEKLVERGISVQSYNGDLLYEPWEIYCEKGKPFTSFNSYWKKCLDMSIESVMLPPPWRLMPITAAAEAIWACSIEELGLENEAEKPSNALLTRAWSPGWSNADKLLNEFIEKQLIDYAKNSKKVVGNSTSLLSPYLHFGEISVRHVFQCARMKQIIWARDKNSEGEESADLFLRGIGLREYSRYICFNFPFTHEQSLLSHLRFFPWDADVDKFKAWRQGRTGYPLVDAGMRELWATGWMHNRIRVIVSSFAVKFLLLPWKWGMKYFWDTLLDADLECDILGWQYISGSIPDGHELDRLDNPALQGAKYDPEGEYIRQWLPELARLPTEWIHHPWDAPLTVLKASGVELGTNYAKPIVDIDTARELLAKAISRTREAQIMIGAAPDEIVADSFEALGANTIKEPGLCPSVSSNDQQVPSAVRYNGSKRVKPEEEEERDMKKSRGFDERELFSTAESSSSSSVFFVSQSCSLASEGKNLEGIQDSSDQITTSLGKNGCK

SEQ ID NO: 1112 - protein, 335 aa, Artificial Sequence
  Synthetic sequence
MNGAIGGDLLLNFPDMSVLERQRAHLKYLNPTFDSPLAGFFADSSMITGGEMDSYLSTAGLNLPMMYGETTVEGDSRLSISPETTLGTGNFKKRKFDTETKDCNEKKKKMTMNRDDLVEEGEEEKSKITEQNNGSTKSIKKMKHKAKKEENNFSNDSSKVTKELEKTDYIHVRARRGQATDSHSIAERVRREKISERMKFLQDLVPGCDKITGKAGMLDEIINYVQSLQRQIEFLSMKLAIVNPRPDFDMDDIFAKEVASTPMTVVPSPEMVLSGYSHEMVHSGYSSEMVNSGYLHVNPMQQVNTSSDPLSCFNNGEAPSMWDSHVQNLYGNLGV

SEQ ID NO: 1113 - protein, 533 aa, Artificial Sequence
  Synthetic sequence
MKRDHHHHHHQDKKTMMMNEEDDGNGMDELLAVLGYKVRSSEMADVAQKLEQLEVMMSNVQEDDLSQLATETVHYNPAELYTWLDSMLTDLNPPSSNAEYDLKAIPGDAILNQFAIDSASSSNQGGGGDTYTTNKRLKCSNGVVETTTATAESTRHVVLVDSQENGVRLVHALLACAEAVQKENLTVAEALVKQIGFLAVSQIGAMRKVATYFAEALARRIYRLSPSQSPIDHSLSDTLQMHFYETCPYLKFAHFTANQAILEAFQGKKRVHVIDFSMSQGLQWPALMQALALRPGGPPVFRLTGIGPPAPDNFDYLHEVGCKLAHLAEAIHVEFEYRGFVANTLADLDASMLELRPSEIESVAVNSVFELHKLLGRPGAIDKVLGVVNQIKPEIFTVVEQESNHNSPIFLDRFTESLHYYSTLFDSLEGVPSGQDKVMSEVYLGKQICNVVACDGPDRVERHETLSQWRNRFGSAGFAAAHIGSNAFKQASMLLALFNGGEGYRVEESDGCLMLGWHTRPLIATSAWKLSTN

SEQ ID NO: 1114 - protein, 345 aa, Artificial Sequence
  Synthetic sequence
MAASDEVNLIESRTVVPLNTWVLISNFKVAYNILRRPDGTFNRHLAEYLDRKVTANANPVDGVFSFDVLIDRRINLLSRVYRPAYADQEQPPSILDLEKPVDGDIVPVILFFHGGSFAHSSANSAIYDTLCRRLVGLCKCVVVSVNYRRAPENPYPCAYDDGWIALNWVNSRSWLKSKKDSKVHIFLAGDSSGGNIAHNVALRAGESGIDVLGNILLNPMFGGNERTESEKSLDGKYFVTVRDRDWYWKAFLPEGEDREHPACNPFSPRGKSLEGVSFPKSLVVVAGLDLIRDWQLAYAEGLKKAGQEVKLMHLEKATVGFYLLPNNNHFHNVMDEISAFVNAEC

SEQ ID NO: 1115 - protein, 358 aa, Artificial Sequence
  Synthetic sequence
MAGGNEVNLNECKRIVPLNTWVLISNFKLAYKVLRRPDGSFNRDLAEFLDRKVPANSFPLDGVFSFDHVDSTTNLLTRIYQPASLLHQTRHGTLELTKPLSTTEIVPVLIFFHGGSFTHSSANSAIYDTFCRRLVTICGVVVVSVDYRRSPEHRYPCAYDDGWNALNWVKSRVWLQSGKDSNVYVYLAGDSSGGNIAHNVAVRATNEGVKVLGNILLHPMFGGQERTQSEKTLDGKYFVTIQDRDWYWRAYLPEGEDRDHPACNPFGPRGQSLKGVNFPKSLVVVAGLDLVQDWQLAYVDGLKKTGLEVNLLYLKQATIGFYFLPNNDHFHCLMEELNKFVHSIEDSQSKSSPVLLTP

SEQ ID NO: 1116 - protein, 344 aa, Artificial Sequence
  Synthetic sequence
MAGSEEVNLIESKTVVPLNTWVLISNFKLAYNLLRRPDGTFNRHLAEFLDRKVPANANPVNGVFSFDVIIDRQTNLLSRVYRPADAGTSPSITDLQNPVDGEIVPVIVFFHGGSFAHSSANSAIYDTLCRRLVGLCGAVVVSVNYRRAPENRYPCAYDDGWAVLKWVNSSSWLRSKKDSKVRIFLAGDSSGGNIVHNVAVRAVESRIDVLGNILLNPMFGGTERTESEKRLDGKYFVTVRDRDWYWRAFLPEGEDREHPACSPFGPRSKSLEGLSFPKSLVVVAGLDLIQDWQLKYAEGLKKAGQEVKLLYLEQATIGFYLLPNNNHFHTVMDEIAAFVNAECQ

SEQ ID NO: 1117 - protein, 11 aa, Artificial Sequence
  Synthetic sequence
YGRKKRRQRRR

SEQ ID NO: 1118 - protein, 12 aa, Artificial Sequence
  Synthetic sequence
RRQRRTSKLMKR

SEQ ID NO: 1119 - protein, 27 aa, Artificial Sequence
  Synthetic sequence
GWTLNSAGYLLGKINLKALAALAKKIL

SEQ ID NO: 1120 - protein, 33 aa, Artificial Sequence
  Synthetic sequence
KALAWEAKLAKALAKALAKHLAKALAKALKCEA

SEQ ID NO: 1121 - protein, 16 aa, Artificial Sequence
  Synthetic sequence
RQIKIWFQNRRMKWKK

SEQ ID NO: 1122 - protein, 11 aa, Artificial Sequence
  Synthetic sequence
YGRKKRRQRRR

SEQ ID NO: 1123 - protein, 9 aa, Artificial Sequence
  Synthetic sequence
RKKRRQRRR

SEQ ID NO: 1124 - protein, 11 aa, Artificial Sequence
  Synthetic sequence
YGRKKRRQRRR

SEQ ID NO: 1125 - protein, 8 aa, Artificial Sequence
  Synthetic sequence
RKKRRQRR

SEQ ID NO: 1126 - protein, 11 aa, Artificial Sequence
  Synthetic sequence
YARAAARQARA

SEQ ID NO: 1127 - protein, 11 aa, Artificial Sequence
  Synthetic sequence
THRLPRRRRRR

SEQ ID NO: 1128 - protein, 11 aa, Artificial Sequence
  Synthetic sequence
GGRRARRRRRR

SEQ ID NO: 1129 - protein, 4 aa, Artificial Sequence
  Synthetic sequence
KYSI

SEQ ID NO: 1130 - protein, 4 aa, Artificial Sequence
  Synthetic sequence
KVLG

SEQ ID NO: 1131 - protein, 4 aa, Artificial Sequence
  Synthetic sequence
EDKK

SEQ ID NO: 1132 - protein, 4 aa, Artificial Sequence
  Synthetic sequence
QLFE

SEQ ID NO: 1133 - protein, 4 aa, Artificial Sequence
  Synthetic sequence
KAIL

SEQ ID NO: 1134 - protein, 4 aa, Artificial Sequence
  Synthetic sequence
VDAK

SEQ ID NO: 1135 - protein, 4 aa, Artificial Sequence
  Synthetic sequence
AILS

SEQ ID NO: 1136 - protein, 4 aa, Artificial Sequence
  Synthetic sequence
AKAI

SEQ ID NO: 1137 - protein, 4 aa, Artificial Sequence
  Synthetic sequence
LSAR

SEQ ID NO: 1138 - protein, 4 aa, Artificial Sequence
  Synthetic sequence
ILSA

SEQ ID NO: 1139 - protein, 4 aa, Artificial Sequence
  Synthetic sequence
RLSK

SEQ ID NO: 1140 - protein, 4 aa, Artificial Sequence
  Synthetic sequence
KSEE

SEQ ID NO: 1141 - protein, 4 aa, Artificial Sequence
  Synthetic sequence
SEET

SEQ ID NO: 1142 - protein, 4 aa, Artificial Sequence
  Synthetic sequence
FEDR

SEQ ID NO: 1143 - protein, 4 aa, Artificial Sequence
  Synthetic sequence
IEER

SEQ ID NO: 1144 - protein, 4 aa, Artificial Sequence
  Synthetic sequence
ERLK

SEQ ID NO: 1145 - protein, 4 aa, Artificial Sequence
  Synthetic sequence
ANLA

SEQ ID NO: 1146 - protein, 4 aa, Artificial Sequence
  Synthetic sequence
ILKE

SEQ ID NO: 1147 - protein, 4 aa, Artificial Sequence
  Synthetic sequence
NRLS

SEQ ID NO: 1148 - protein, 4 aa, Artificial Sequence
  Synthetic sequence
GKSD

SEQ ID NO: 1149 - protein, 4 aa, Artificial Sequence
  Synthetic sequence
KLIR

SEQ ID NO: 1150 - protein, 4 aa, Artificial Sequence
  Synthetic sequence
DYKV

SEQ ID NO: 1151 - protein, 4 aa, Artificial Sequence
  Synthetic sequence
AKSE

SEQ ID NO: 1152 - protein, 4 aa, Artificial Sequence
  Synthetic sequence
KYFF

SEQ ID NO: 1153 - protein, 4 aa, Artificial Sequence
  Synthetic sequence
KTEI

SEQ ID NO: 1154 - protein, 4 aa, Artificial Sequence
  Synthetic sequence
TEIT

SEQ ID NO: 1155 - protein, 4 aa, Artificial Sequence
  Synthetic sequence
KTEI

SEQ ID NO: 1156 - protein, 5 aa, Artificial Sequence
  Synthetic sequence
KTEIT

SEQ ID NO: 1157 - protein, 4 aa, Artificial Sequence
  Synthetic sequence
EITL

SEQ ID NO: 1158 - protein, 4 aa, Artificial Sequence
  Synthetic sequence
NGEI

SEQ ID NO: 1159 - protein, 4 aa, Artificial Sequence
  Synthetic sequence
GEIR

SEQ ID NO: 1160 - protein, 4 aa, Artificial Sequence
  Synthetic sequence
PLIE

SEQ ID NO: 1161 - protein, 4 aa, Artificial Sequence
  Synthetic sequence
TNGE

SEQ ID NO: 1162 - protein, 4 aa, Artificial Sequence
  Synthetic sequence
VAKV

SEQ ID NO: 1163 - protein, 4 aa, Artificial Sequence
  Synthetic sequence
GKSK

SEQ ID NO: 1164 - protein, 4 aa, Artificial Sequence
  Synthetic sequence
KLKS

SEQ ID NO: 1165 - protein, 4 aa, Artificial Sequence
  Synthetic sequence
KSKK

SEQ ID NO: 1166 - protein, 4 aa, Artificial Sequence
  Synthetic sequence
KNPI

SEQ ID NO: 1167 - protein, 4 aa, Artificial Sequence
  Synthetic sequence
GYKE

SEQ ID NO: 1168 - protein, 4 aa, Artificial Sequence
  Synthetic sequence
KEVK

SEQ ID NO: 1169 - protein, 4 aa, Artificial Sequence
  Synthetic sequence
VKKD

SEQ ID NO: 1170 - protein, 4 aa, Artificial Sequence
  Synthetic sequence
LIIK

SEQ ID NO: 1171 - protein, 4 aa, Artificial Sequence
  Synthetic sequence
SLFE

SEQ ID NO: 1172 - protein, 4 aa, Artificial Sequence
  Synthetic sequence
GRKR

SEQ ID NO: 1173 - protein, 4 aa, Artificial Sequence
  Synthetic sequence
LASA

SEQ ID NO: 1174 - protein, 4 aa, Artificial Sequence
  Synthetic sequence
ELAL

SEQ ID NO: 1175 - protein, 4 aa, Artificial Sequence
  Synthetic sequence
SKYV

SEQ ID NO: 1176 - protein, 4 aa, Artificial Sequence
  Synthetic sequence
FLYL

SEQ ID NO: 1177 - protein, 4 aa, Artificial Sequence
  Synthetic sequence
LYLA

SEQ ID NO: 1178 - protein, 4 aa, Artificial Sequence
  Synthetic sequence
YLAS

SEQ ID NO: 1179 - protein, 4 aa, Artificial Sequence
  Synthetic sequence
EKLK

SEQ ID NO: 1180 - protein, 4 aa, Artificial Sequence
  Synthetic sequence
EDNE

SEQ ID NO: 1181 - protein, 4 aa, Artificial Sequence
  Synthetic sequence
NEQK

SEQ ID NO: 1182 - protein, 4 aa, Artificial Sequence
  Synthetic sequence
DANL

SEQ ID NO: 1183 - protein, 4 aa, Artificial Sequence
  Synthetic sequence
NLDK

SEQ ID NO: 1184 - protein, 4 aa, Artificial Sequence
  Synthetic sequence
DKVL

SEQ ID NO: 1185 - protein, 5 aa, Artificial Sequence
  Synthetic sequence
DKVLS

SEQ ID NO: 1186 - protein, 4 aa, Artificial Sequence
  Synthetic sequence
VLSA

SEQ ID NO: 1187 - protein, 4 aa, Artificial Sequence
  Synthetic sequence
HRDK

SEQ ID NO: 1188 - protein, 4 aa, Artificial Sequence
  Synthetic sequence
DKPI

SEQ ID NO: 1189 - protein, 4 aa, Artificial Sequence
  Synthetic sequence
PIRE
